(19) United States
(12) Patent Application Publication
(10) Pub. No.: US 2002/0127687 A1
(43) Pub. Date: Sep. 12, 2002

(54) Genome DNA of bacterial symbiont of aphids

(76) Inventors: Shuji Shigenobu, Tokyo (JP); Hidemi Watanabe, Kanagawa (JP); Hajime Ishikawa, Kanagawa (JP); Masahira Hattori, Tokyo (JP); Yoshiyuki Sakaki, Kanagawa (JP)

Correspondence Address: FOLEY & LARDNER, Washington Harbour, Suite 500, 3000 K Street, N.W., Washington, DC, 20007-5109, US

(21) Appl. No.: 09/790,988

(22) Filed: Feb. 23, 2001

(30) Foreign Application Priority Data
Apr. 7, 2000 (JP) 2000-107160

(51) Int. Cl. C12N 9/22; C07H 21/04; C12P 21/02; C12N 5/06

(52) U.S. Cl. 435/199; 435/69.1; 435/325; 435/320.1; 536/23.2

(57) ABSTRACT

The present invention provides genomic DNA of Buchnera. That is, this invention provides genes derived from Buchnera sp., comprising DNA of the following (a) or (b);

(a) a DNA selected from a group consisting of a DNA having a nucleotide sequence ranging from a start point to an end point as shown in Table 1 in a nucleotide sequence represented by SEQ ID NO:1, or a DNA complementary thereto, and

(b) a DNA hybridizing to said DNA of (a) under stringent conditions and encoding a protein having a function same as that of the product expressed by said DNA.

### FIELD OF THE INVENTION

[0001] The present invention relates to genomic DNA and plasmid DNA of aphids Buchnera sp.

### BACKGROUND OF THE INVENTION

[0002] Buchnera sp. APS is a bacterial symbiont harbored by aphids. The host aphids are insects belonging to the suborder homoptero of the order hemiptera. Nearly 10,000 species of them are known throughout the world. Aphids have extremely strong fertility based on diploid parthenogenesis, and are one of the most serious agricultural insect pests on the earth. Aphids harbor many bacteria called Buchnera sp. in specialized cells, called bacteriocyte. The mutualism between Buchnera and aphids is so obligate that the symbiont Buchnera cannot survive outside the host aphid and aphids lacking Buchnera lose their fertility in addition to decreased growth.

[0003] Hence, noticing the host-symbiont relationship of the aphid and Buchnera is useful to obtain information to destroy aphids.

### SUMMARY OF THE INVENTION

[0004] The present invention is to provide genomic DNA and plasmid DNA of Buchnera sp.

[0005] The present inventors have succeeded in determining a whole nucleotide sequence of genome of Buchnera, which is a bacterial symbiont harbored by Acyrthosiphon pisum and in identifying 619 genes (including plasmids) contained in the genome as a result of diligent research on the above problems.

[0006] That is, the present invention provides genes derived from Buchnera sp., comprising DNA of (a) or (b) as follows.

[0007] (a) a DNA selected from a group consisting of a DNA having a nucleotide sequence ranging from a start point to an end point as shown in Table 1 in a nucleotide sequence represented by SEQ ID NO:1, or a DNA complementary thereto, and

[0008] (b) a DNA hybridizing to said DNA of (a) under stringent conditions and encoding a protein having a function same as that of the product expressed by the DNA.

[0009] Here, the term “the product expressed by said DNA” means one of (a substance encoded by a sequence ranging from a start point to an end point) substances described in “Substance Name” column of Table 1.

[0010] Further, the present invention provides a recombinant vector containing the above gene or a transformant containing the vector.

[0011] Furthermore, the present invention provides genomic DNA of Buchnera sp. having a nucleotide sequence represented by SEQ ID NO:1.

[0012] Furthermore, the present invention provides a plasmid derived from Buchnera sp., comprising DNA of the (c) or (d) as follows.

[0013] (c) a DNA having a nucleotide sequence represented by SEQ ID NO:2 or 3, and

[0014] (d) a plasmid, capable of hybridizing to the DNA having a nucleotide sequence represented by SEQ ID NO:2 or 3 under stringent conditions, and self-replicating.

[0015] Further, the present invention provides a method of producing the above-mentioned protein, comprising the steps of culturing the transformant and collecting the protein expressed by a target gene from the resulting culture product.

[0016] Hereinafter, a more detailed explanation of this invention will be given. The present specification includes the contents of the specifications and/or drawings of the Japanese Patent Applications No. 2000-107160 based on which the present application claims priority.

[0017] The present invention relates to genomic DNA with a length of approximately 640 kb of Buchnera sp. (hereinafter also referred to as Buchnera) and two plasmid DNAs present in Buchnera sp.

[0018] 1. Cloning of Buchnera genomic DNA and plasmids

[0019] Buchnera can be obtained by the following techniques. For example, the host aphids harboring Buchnera are dissected, and huge cells (called bacteriocyte) in which Buchnera is living are isolated. The bacteriocytes are crushed and filtered through a 5 μm pore size filter, thereby isolating Buchnera. Buchnera can also be isolated by homogenizing aphids and filtering the homogenates through 20, 10, and 5 μm pore size filters in order. Moreover, Buchnera can be isolated by density gradient centrifugation using sucrose or percoll (Pharmacia).

[0020] An example of aphids is Acyrthosiphon pisum (Harris).

[0021] Next, genomic DNA is prepared from Buchnera. The genomic DNA can be prepared by known methods including a phenol/chloroform protocol.

[0022] Thus obtained DNA can be analyzed by the whole genome shotgun sequencing in this invention. The whole genome shotgun sequencing is to provide information on a whole genomic sequence, comprising the steps of fragmenting and sequencing randomly the whole genome in large quantities, and searching fragment ends overlapping to each other using a computer to join them together. That is, this method involves sequencing each DNA fragment treated with restriction enzymes or each DNA fragment fragmented at a random site using HydroShear (GeneMachines) and the like, comparing the sequences to each other to find overlapping portions, and then connecting the overlapping ends of the fragments, whereby determining the whole sequence.

[0023] This technique is basically the same as that of Fleischmann R. D. et al (Whole-genome random sequencing and assembly of Haemophilus influenzae Rd. Science 269, 469-512, 1995). In order to avoid chimera formation in preparing shotgun sequence libraries, some methods (for example, Partial Fill-in method) can be adapted. In the partial fill-in method, bases of overhang ends are partially polymerized.

[0024] The nucleotide sequences of the above DNA fragments can be determined by known techniques including Sanger method (Molecular Cloning, vol. 2, 13.3, 1989) and methods based on PCR. Normally, nucleotide sequences are determined by performing sequencing reactions with PRISM sequencing kit and the like containing fluorescent dideoxy terminator (Perkin Elmer), and using an autosequencer (model ABI 377, Applied Biosystem).

[0025] SEQ ID NO:1 represents the whole sequence of the genomic DNA of this invention. In addition, Table 1 shows all the genes (608 genes excluding plasmids) contained in the nucleotide sequence of the chromosome represented by SEQ ID NO:1. 572 genes encoding proteins contained in the above genes can be isolated by, for example, PCR method. In Table 1, “F” represents + chain and “R” represents − chain in the data in “Orientation” column. “Type” represents the sequence type of a gene. For example, CDS represents translation regions for proteins, tRNA transfer RNA, rRNA ribosomal RNA, and PS pseudogenes. Pseudogenes (PS) contain frameshift mutation or a stop codon inserted in the middle. When a direction is “F,” data in “Start point” column represents an initiation point for translation of a substance to be encoded by the gene, and data in “End point” column represents a termination point for the translation. For example, in Table 1, a second (BU002) gene (gene name: atpB) corresponds to a nucleotide sequence from 2278^{th} to 3102^{nd} bases and encodes ATP-synthetase A-chain. When a direction is “R,” translation proceeds in the direction opposite to that of the complementary strand from an initiation to an end point. For example, in Table 1, a 10^{th} (BU010) gene (gene name: gyrB) represents a complementary strand of a nucleotide sequence from 8911^{th} to 11322^{nd} bases of a nucleotide sequence of SEQ ID NO:1. Translation proceeds in the direction from 11322^{nd} to 8911^{th} base based on the sequence position in SEQ ID NO:1. The remainder genes also encode substances (proteins, enzymes nucleic acids and the like) described in “Substance name” column according to nucleotide sequences between “Start point” and “End point” described in Table 1 or their complementary sequences.

TABLE 1

| ID | gene name | type^{a} | orientation | start (bp) | end (bp) | description |
|---|---|---|---|---|---|---|
| BU001 | gidA | CDS | F | 197 | 2083 | glucose inhibited division protein A |
| BU002 | atpB | CDS | F | 2278 | 3102 | ATP synthase A chain |
| BU003 | atpE | CDS | F | 3139 | 3378 | ATP synthase C chain |
| BU004 | atpF | CDS | F | 3497 | 3982 | ATP synthase B chain |
| BU005 | atpH | CDS | F | 3982 | 4515 | ATP synthase delta chain |
| BU006 | atpA | CDS | F | 4530 | 6068 | ATP synthase alpha chain |
| BU007 | atpG | CDS | F | 6101 | 6973 | ATP synthase gamma chain |
| BU008 | atpD | CDS | F | 6997 | 8394 | ATP synthase beta chain |
| BU009 | atpC | CDS | F | 8421 | 8837 | ATP synthase epsilon chain |
| BU010 | gyrB | CDS | R | 8911 | 11322 | DNA gyrase subunit B |
| BU011 | dnaN | CDS | R | 11449 | 12549 | DNA polymerase III beta chain |
| BU012 | dnaA | CDS | R | 12554 | 13918 | chromosomal replication initiator protein dnaA |
| BU013 | rpmH | CDS | F | 14369 | 14512 | 50S ribosomal protein L34 |
| BU014 | rnpA | CDS | F | 14525 | 14872 | ribonuclease P protein component |
| BU015 | yidC | CDS | F | 15011 | 16609 | 60 kD inner-membrane protein |
| BU016 | thdF | CDS | F | 16651 | 18009 | thiophene and furan oxidation protein thdF |
| BU017 | tRNA-Phe | tRNA | R | 18028 | 18100 | tRNA-Phe (GAA) |
| BU018 | mopB | CDS | F | 18376 | 18666 | 10 kD chaperonin |
| BU019 | mopA | CDS | F | 18715 | 20361 | 60 kD chaperonin |
| BU020 | efp | CDS | F | 20985 | 21596 | elongation factor P |
| BU021 | dnaC | CDS | R | 21614 | 22354 | DNA replication protein dnaC |
| BU022 | dnaT | CDS | R | 22354 | 22848 | primosomal protein I |
| BU023 | yhhF | CDS | R | 22945 | 23520 | hypothetical protein |
| BU024 | ftsY | CDS | F | 23651 | 24787 | cell division protein ftsY |
| BU025 | rpoH | CDS | F | 24950 | 25804 | RNA polymerase sigma-32 factor |
| BU026 | glmS | CDS | R | 25945 | 27810 | D-fructose-6-phosphate amidotransferase |
| BU027 | glmU | CDS | R | 27844 | 29223 | UDP-N-acetylglucosamine pyrophosphorylase |
| BU028 | yigL | CDS | F | 29403 | 29972 | hypothetical protein |
| BU029 | cof | CDS | F | 30011 | 30220 | cof protein |
| BU030 | metE | CDS | F | 31191 | 33467 | 5-methyltetrahydropteroyltriglutamate-homocysteine |
| | | | | | | S-methyltransferase |
| BU031 | purH | CDS | R | 33590 | 35167 | phosphoribosylaminoimidazolecarboxamide |
| | | | | | | formyltransferase/IMP cyclohydrolase |
| BU032 | hupA | CDS | R | 35308 | 35586 | DNA-binding protein hu-alpha |
| BU033 | rpoC | CDS | R | 36321 | 40544 | DNA-directed RNA polymerase beta′ chain |
| BU034 | rpoB | CDS | R | 40622 | 44650 | DNA-directed RNA polymerase beta chain |
| BU035 | rplL | CDS | R | 44871 | 45239 | 50S ribosomal protein L7/L12 |
| BU036 | rplJ | CDS | R | 45306 | 45803 | 50S ribosomal protein L10 |
| BU037 | rplA | CDS | R | 46069 | 46764 | 50S ribosomal protein L1 |
| BU038 | rplK | CDS | R | 46767 | 47195 | 50S ribosomal protein L11 |
| BU039 | nusG | CDS | R | 47243 | 47788 | transcription antitermination protein nusG |
| BU040 | secE | CDS | R | 47791 | 48174 | preprotein translocase secE subunit |
| BU041 | tRNA-Thr | tRNA | R | 48488 | 48560 | tRNA-Thr (GGT) |
| BU042 | tRNA-Gly | tRNA | R | 48576 | 48647 | tRNA-Gly (TCC) |
| BU043 | tRNA-Tyr | tRNA | R | 48670 | 48754 | tRNA-Tyr (GTA) |
| BU044 | tRNA-Thr | tRNA | A | 48770 | 48842 | tRNA-Thr (TGT) |
| BU045 | murB | CDS | R | 48981 | 50051 | UDP-N-acetylenolpyruvoylglucosamine reductase |
| BU046 | metF | CDS | F | 50166 | 51044 | 5,10-methylenetetrahydrotolate reductase |
| BU047 | argE | CDS | R | 51056 | 52201 | acetylornithine deacetylase |
| BU048 | argC | CDS | F | 52362 | 53366 | N-acetyl-gamma-glutamyl-phosphate reductase |
| BU049 | argB | CDS | F | 53387 | 54160 | acetylglutamate kinase |
| BU050 | argG | CDS | F | 54190 | 55401 | argininosuccinate synthase |
| BU051 | argH | CDS | F | 55473 | 56852 | argininosuccinate lyase |
| BU052 | yibN | CDS | F | 56934 | 57368 | hypothetical protein |
| BU053 | secB | CDS | F | 57475 | 57903 | protein-export protein secB |
| BU054 | cysE | CDS | F | 58005 | 58829 | serine acetyltransferase |
| BU055 | rpoD | CDS | R | 58935 | 60773 | ANA polymerase sigma factor rpoD |
| BU056 | dnaG | CDS | R | 60941 | 62674 | DNA primase |
| BU057 | rpsU | CDS | R | 62755 | 62970 | 30D ribosomal protein S21 |
| BU058 | vgjD | CDS | F | 63204 | 64214 | O-sialoglycoprotein endopeptidase |
| BU059 | ribB | CDS | R | 64192 | 64839 | 3,4-dihydroxy-2-butanone 4-phosphate synthase |
| BU060 | yb3052 | CDS | R | 65111 | 66058 | putative kinase |
| BU061 | cca | CDS | F | 66272 | 67516 | tRNA nucleotidyltransferase |
| BU062 | bacA | CDS | R | 67542 | 68339 | bacitracin resistance protein |
| BU063 | crr | CDS | R | 68425 | 68910 | glucose-permease IIA component |
| BU064 | ptsI | CDS | R | 68960 | 70675 | phosphoenolpyruvate-protein phosphotransferase |
| BU065 | ptsH | CDS | R | 70824 | 71081 | phosphocarrier protein HPr |
| BU066 | cysK | CDS | R | 71230 | 72177 | cysteine synthase A |
| BU067 | lig | CDS | F | 72432 | 74459 | DNA ligase (NAD+) |
| BU068 | tRNA-Lys | tRNA | R | 74471 | 74543 | tRNA-Lys (TTT) |
| BU069 | tRNA-Val | tRNA | R | 74572 | 74644 | tRNA-Val (TAC) |
| BU070 | gltX | CDS | F | 74771 | 76174 | glutamyl-tRNA synthetase |
| BU071 | tRNA-Ala | tRNA | F | 76347 | 76422 | tRNA-Ala (GGC) |
| BU072 | fliE | CDS | R | 76514 | 76810 | flagellar hook-basal body complex protein fliE |
| BU073 | fliF | CDS | F | 77074 | 78711 | flagellar M-ring protein |
| BU074 | fliG | CDS | F | 78708 | 79703 | flagellar motor switch protein fliG |
| BU075 | fliH | CDS | F | 79696 | 80358 | flagellar assembly protein fliH |
| BU076 | fliI | CDS | F | 80316 | 81719 | flagellum-specific ATP synthase |
| BU077 | fliJ | CDS | F | 81749 | 82186 | flagehlar fliJ protein |
| BU078 | yba2 | CDS | F | 82195 | 82533 | hypothetical protein |
| BU079 | fliK | CDS | F | 82624 | 83331 | flagellar hook-length control protein |
| BU080 | fliM | CDS | F | 83392 | 84339 | flagellar motor switch protein fliM |
| BU081 | fliN | CDS | F | 84332 | 84733 | flagellar motor switch protein fliN |
| BU082 | fliP | CDS | F | 84745 | 85884 | flagellar biosynthetic protein fliP |
| BU083 | fliQ | CDS | F | 85956 | 86225 | flagellar biosynthetic protein fliQ |
| BU084 | fliR | CDS | F | 86225 | 87001 | flagellar biosynthetic protein fliR |
| BU085 | rpmG | CDS | R | 87154 | 87321 | 50S ribosomal protein L33 |
| BU086 | rpmB | CDS | R | 87332 | 87559 | 508 ribosomal protein L28 |
| BU087 | ytfN | CDS | F | 87905 | 90817 | hypothetical protein |
| BU088 | ppa | CDS | R | 90833 | 91381 | inorganic pyrophosphatase |
| BU089 | pmbA | CDS | F | 91575 | 92915 | pmbA protein |
| BU090 | rnpB | RNA | R | 92990 | 93313 | ribonuclease P RNA component |
| BU091 | yraL | CDS | R | 93393 | 94241 | hypothoical protein |
| BU092 | fabB | CDS | F | 94380 | 95600 | 3-oxoacyl-[acyl-carrier-protein] synthase I |
| BU093 | talA | CDS | F | 95840 | 96790 | transaldolase A |
| BU094 | tktB | CDS | F | 96845 | 98842 | transketolase |
| BU095 | dapE | CDS | F | 98947 | 100074 | succinyl-diaminopimelate desuccinylase |
| BU096 | dapA | CDS | R | 100464 | 101348 | dihydrodipicolinate synthase |
| BU097 | aroC | CDS | R | 101924 | 102988 | chorismate synthase |
| BU098 | yb2331 | CDS | F | 103284 | 103844 | hypothetical protein |
| BU099 | hisG | CDS | F | 104169 | 105068 | ATP phosphoribosyltransferase |
| BU100 | hisD | CDS | F | 105077 | 106384 | histidinol dehydrogenase |
| BU101 | hisC | CDS | F | 106381 | 107487 | histidinol-phosphate aminotransferase |
| BU102 | hisB | CDS | F | 107477 | 108538 | imidazoleglycerol-phosphate dehydratase/histidinol- |
| | | | | | | phosphatase |
| BU103 | hisH | CDS | F | 108538 | 109128 | amidotransferase hisH |
| BU104 | hisA | CDS | F | 109133 | 109873 | phosphoribosylformimino-5-aminoimidazole |
| | | | | | | carboxamide ribotide isomerase |
| BU105 | hisF | CDS | F | 109852 | 110628 | hisF protein |
| BU106 | hisI | CDS | F | 110622 | 111269 | phosphoribosyl-AMP cyclohydrolase/phosphoribosyl- |
| | | | | | | ATP pyrophosphohydrolase |
| BU107 | gnd | CDS | F | 111628 | 113034 | 6-phosphogluconate dehydrogenase |
| | | | | | | (decarboxylating) |
| BU108 | dcd | CDS | F | 113197 | 113817 | deoxycytidine triphosphate deaminase |
| BU109 | metG | CDS | F | 113965 | 115608 | methionyl-tRNA synthetase |
| BU110 | mesJ | CDS | R | 115656 | 116978 | cell cycle protein mesJ |
| BU111 | tRNA-Val | tRNA | R | 117007 | 117080 | tRNA-Val (GAC) |
| BU112 | ribE | CDS | F | 117204 | 117830 | riboflavin synthase alpha chain |
| BU113 | rnfA | CDS | F | 117867 | 118445 | hypothetical protein |
| BU114 | rnfB | CDS | F | 118451 | 118954 | Ferredoxin II |
| BU115 | rnfC | CDS | F | 119117 | 120538 | putative membrane protein |
| BU116 | ydgO | CDS | F | 120631 | 121629 | hypothetical protein |
| BU117 | rnfG | CDS | F | 121778 | 122272 | nitrogen fixation protein |
| BU118 | ydgQ | CDS | F | 122247 | 122930 | hypothetical protein |
| BU119 | nth | CDS | F | 122941 | 123573 | endonuclease III |
| BU120 | priA | CDS | F | 123653 | 125776 | primosomal protein N |
| BU121 | tyrS | CDS | F | 125936 | 127204 | tyrosyl-tRNA synthetase |
| BU122 | vdiC | CDS | R | 127212 | 127604 | hypothetical protein |
| BU123 | yb1688 | CDS | F | 127828 | 128910 | hypothetical protein |
| BU124 | aroH | CDS | F | 129262 | 130308 | phospho-2-dehydro-3-deoxyheptonate aldolase (Trp- |
| | | | | | | sensitive) |
| BU125 | thrS | CDS | F | 130460 | 132388 | threonyl-tRNA synthetase |
| BU126 | infC | CDS | F | 132392 | 132931 | translation initiation factor IF-3 |
| BU127 | rpmI | CDS | F | 133018 | 133215 | 50S ribosomal protein L35 |
| BU128 | rplT | CDS | F | 133258 | 133614 | 50S ribosomal protein L20 |
| BU129 | pheS | CDS | F | 133809 | 134798 | phenylalanyl-tRNA synthetase alpha chain |
| BU130 | pheT | CDS | F | 134808 | 137195 | phenylalanyl-tRNA synthetase beta chain |
| BU131 | himA | CDS | F | 137200 | 137508 | integration host factor alpha-subunit |
| BU132 | queA | CDS | F | 137550 | 138623 | S-adenosylmethionine:tRNA ribosyltransferase- |
| | | | | | | isomerase |
| BU133 | tgt | CDS | F | 138664 | 139776 | queuine tRNA-ribosyltransferase |
| BU134 | yajC | CDS | F | 139801 | 140136 | hypothetical protein |
| BU135 | glyS | CDS | R | 140188 | 142260 | glycyl-tRNA synthetase beta chain |
| BU136 | glyQ | CDS | R | 142235 | 143203 | glycyl-tRNA synthetase alpha chain |
| BU137 | nfo | CDS | F | 143868 | 144713 | endonuclease IV |
| BU138 | rplY | CDS | F | 144748 | 145035 | 50S ribosomal protein L25 |
| BU139 | yabI | CDS | R | 145105 | 145875 | hypothetical protein |
| BU140 | surA | CDS | F | 146062 | 147354 | survival protein surA precursor |
| BU141 | ksgA | CDS | F | 147408 | 148229 | dimethyladenosine transferase |
| BU142 | apaH | CDS | F | 148274 | 149098 | bis(5′-nucleosyl)-tetraphosphatase (symmetrical) |
| BU143 | folA | CDS | R | 149125 | 149610 | dihydrofolate reductase |
| BU144 | carB | CDS | R | 149700 | 152939 | carbamoyl-phosphate synthase large chain |
| BU145 | carA | CDS | R | 152953 | 154116 | carbamoyl-phosphate synthase small chain |
| BU146 | dapB | CDS | R | 154326 | 155135 | dihydrodipicolinate reductase |
| BU147 | lytB | CDS | R | 155139 | 156098 | lytB protein |
| BU148 | lspA | CDS | R | 156163 | 156645 | lipoprotein signal peptidase |
| BU149 | ileS | CDS | R | 156645 | 159467 | isoleucyl-tRNA synthetase |
| BU150 | ribF | CDS | R | 159484 | 160425 | riboflavin kinase/FMN adenylyltransferase |
| BU151 | rpsT | CDS | F | 180640 | 160909 | 30S ribosomal protein S20 |
| BU152 | dnaJ | CDS | R | 160960 | 162093 | dnaJ protein |
| BU153 | dnaK | CDS | R | 162206 | 164119 | dnaK protein |
| BU154 | nuoA | CDS | F | 164454 | 164858 | NADH dehydrogenase I chain A |
| BU155 | nuoB | CDS | F | 164892 | 165566 | NADH dehydrogenase I chain B |
| BU156 | nuoCD | CDS | F | 165657 | 167459 | NADH dehydrogenase I chain C/D |
| BU157 | nuoE | CDS | F | 167482 | 167970 | NADH dehydrogenase I chain E |
| BU158 | nuoF | CDS | F | 167967 | 169301 | NADH dehydrogenase I chain F |
| BU159 | nuoG | CDS | F | 169395 | 172115 | NADH dehydrogenase I chain G |
| BU160 | nuoH | CDS | F | 172127 | 173095 | NADH dehydrogenase I chain H |
| BU161 | nuoI | CDS | F | 173120 | 173662 | NADH dehydrogenase I chain I |
| BU162 | nuoJ | CDS | F | 173672 | 174184 | NADH dehydrogenase I chain J |
| BU163 | nuoK | CDS | F | 174215 | 174517 | NADH dehydrogenase I chain K |
| BU164 | nuoL | CDS | F | 174514 | 176358 | NADH dehydrogenase I chain L |
| BU165 | nuoM | CDS | F | 176455 | 177972 | NADH dehydrogenase I chain M |
| BU166 | nuaN | CDS | F | 178030 | 179439 | NADH dehydrogenase I chain N |
| BU167 | folC | CDS | F | 180565 | 181800 | folylpolyglutamate synthase/dihydrofolate synthase |
| BU168 | cvpA | PS | F | 181820 | 182301 | colicin V production protein with frameshift |
| BU169 | prsA | CDS | R | 182379 | 183317 | ribose-phosphate pyrophosphokinase |
| BU170 | ychB | CDS | R | 183446 | 184330 | hypothetical protein |
| BU171 | prfA | CDS | F | 184538 | 185623 | peptide chain release factor 1 |
| BU172 | hemK | CDS | F | 185620 | 186453 | hemK protein |
| BU173 | ychA | CDS | F | 186613 | 187422 | hypothetical protein |
| BU174 | nadE | CDS | R | 187430 | 188236 | nh(3)-dependent NAO(+) synthetase |
| BU175 | ackA | CDS | F | 188320 | 189537 | acetate kinase |
| BU176 | pta | CDS | F | 189582 | 191708 | phosphate acetyltransf erase |
| BU177 | yfaE | CDS | R | 191740 | 192003 | hypothetical protein |
| BU178 | nrdB | CDS | R | 192006 | 193136 | ribonucleoside-diphosphate reductase 1 beta chain |
| BU179 | nrdA | CDS | R | 193204 | 195489 | ribonucleoside-diphosphate reductase 1 alpha chain |
| BU180 | gyrA | CDS | R | 195562 | 198054 | DNA gyrase subunit A |
| BU181 | yba2 | CDS | F | 198321 | 199037 | hypothetical protein |
| BU182 | ahpC | CDS | R | 199160 | 199753 | alkyl hydroperoxide reductase |
| BU183 | ung | CDS | F | 199831 | 200493 | uracil-DNA glycosylase |
| BU184 | grpE | CDS | R | 200569 | 201135 | heat shock protein grpE 2 |
| BU185 | yfjB | CDS | F | 201252 | 202130 | hypothetical protein |
| BU186 | smpA | CDS | F | 202263 | 202571 | small protein A |
| BU187 | ydhD | CDS | F | 203108 | 203434 | hypothetical protein |
| BU188 | rnt | CDS | R | 203578 | 204243 | ribonuclease T |
| BU189 | sodA | CDS | F | 204463 | 205074 | superoxide dismutase |
| BU190 | pth | CDS | F | 205262 | 205795 | peptidyl-tRNA hydrolase |
| BU191 | ychF | CDS | F | 205836 | 206924 | probable GTP-binding protein |
| BU192 | thrC | CDS | R | 207000 | 208289 | threonine synthase |
| BU193 | thrB | CDS | R | 208296 | 209225 | homoserine kinase |
| BU194 | thrA | CDS | R | 209246 | 211696 | aspartokinase I/homoserine dehydrogenase I |
| BU195 | hpt | CDS | F | 212355 | 212855 | hypoxanthine phosphoribosyltransferase |
| BU196 | panC | CDS | R | 212899 | 213756 | pantoate-beta-alanine ligase |
| BU197 | panB | CDS | R | 213771 | 214562 | 3-methyl-2-oxobutanoate hydroxymethyltransferase |
| BU198 | dksA | CDS | R | 214678 | 215133 | dnaK suppressor protein |
| BU199 | truA | CDS | F | 215390 | 216190 | pseudouridylate synthase I |
| BU200 | mrcB | CDS | F | 216262 | 218544 | penicillin-binding protein 1b |
| BU201 | secA | CDS | F | 218774 | 221401 | preprotein translocase secA subunit |
| BU202 | mutT | CDS | F | 221477 | 221851 | mutator mutT protein |
| BU203 | yacE | CDS | R | 221834 | 222487 | hypothetical protein |
| BU204 | guaC | CDS | F | 222543 | 223592 | GMP reductase |
| BU205 | aceE | CDS | F | 223819 | 226482 | pyruvate dehydrogenase e1 component |
| BU206 | aceF | CDS | F | 226513 | 227703 | dihydrolipoamide acetyltransferase |
| BU207 | IpdA | CDS | F | 227748 | 229169 | dihydrolipoamide dehydrogenase |
| BU208 | speD | CDS | R | 229342 | 230139 | S-adenosylmethionine decarboxylase proenzyme |
| Bu209 | speE | CDS | R | 230158 | 231018 | spermidine synthase |
| BU210 | pfs | CDS | R | 231294 | 231992 | 5-methylthioadenosine/S-adenosylhomocysteine |
| | | | | | | nucleosidase |
| BU211 | yadR | CDS | R | 232056 | 232400 | hypothetical protein |
| BU212 | ftsZ | CDS | R | 232634 | 233788 | cell division protein ftsZ |
| Bu213 | ftsA | CDS | R | 233846 | 235102 | cell division protein ftsA |
| Bu214 | ddlB | PS | R | 235298 | 236220 | D-alanine-D-alanine ligase B (D-alanylalanine |
| | | | | | | synthetase) |
| BU215 | murC | CDS | R | 236217 | 237671 | UDP-N-acetylmuramate-alanine ligase |
| BU216 | murG | CDS | R | 237714 | 238778 | UDP-N-acetylglucosamine-N-acetylmuramyl- |
| | | | | | | (pentapeptide) pyrophosphoryl-undecaprenol N- |
| | | | | | | acetylglucosamine transferase |
| BU217 | ftsW | CDS | R | 238775 | 239974 | cell division protein ftsW |
| BU218 | murD | CDS | R | 239971 | 241293 | UDP-N-acetylmuramoylalanine-D-glutamate ligase |
| BU219 | mraY | CDS | R | 241293 | 242366 | phospho-N-acetylmuramoyl-pentapeptide-transferase |
| BU220 | murF | CDS | R | 242360 | 243727 | UDP-N-acetylmuramoylalanyl-D-glutamyl-2,6- |
| | | | | | | diaminopimelate-D-alanyl-D-alanyl ligase |
| BU221 | murE | CDS | R | 243724 | 245217 | UDP-N-acetylmuramoylalanyl-D-glutamate-2,6- |
| | | | | | | diaminopimelate ligase |
| BU222 | ftsI | CDS | R | 245218 | 246957 | cell division protein ftsI |
| BU223 | ftsL | CDS | R | 247072 | 247275 | cell division protein ftsL |
| BU224 | yabC | CDS | R | 247278 | 248216 | hypothetical protein |
| BU225 | ilvH | CDS | R | 248338 | 248814 | acetolactate synthase small subunit |
| BU226 | ilvI | CDS | R | 248819 | 250534 | acetolactate synthase large subunit |
| BU227 | apbE | PS | R | 250805 | 251880 | thiamine biosynthesis lipoprotein ApbE precursor |
| BU228 | htrA | CDS | F | 252152 | 253588 | protease do precursor |
| BU229 | dapD | CDS | R | 253632 | 254456 | 2,3,4,5-tetrahydropyridine-2-carboxylate N- |
| | | | | | | succinyltransferase |
| BU230 | map | CDS | R | 254517 | 255311 | methionine aminopeptidase |
| BU231 | rpsB | CDS | F | 255574 | 256308 | 30S ribosomal protein S2 |
| BU232 | tsf | CDS | F | 256385 | 257191 | elongation factor Ts |
| BU233 | pyrH | CDS | F | 257242 | 257970 | uridylate kinase |
| BU234 | frr | CDS | F | 258051 | 258608 | ribosome recycling factor |
| BU235 | dxr | CDS | F | 256691 | 259887 | 1-deoxy-D-xylulose 5-phosphate reductoisomerase |
| BU236 | uppS | CDS | F | 259980 | 260735 | undecaprenyl pyrophosphate synthetase |
| BU237 | yaeT | CDS | F | 260969 | 262822 | hypothetical protein |
| BU238 | dnaE | CDS | F | 262859 | 266344 | DNA polymerase III alpha chain |
| BU239 | proS | CDS | R | 266472 | 268190 | prolyl-tRNA synthetase |
| BU240 | flhB | CDS | F | 268530 | 269681 | flagellar biosynthetic protein flhB |
| BU241 | flhA | CDS | F | 269665 | 271764 | flagellar biosynthesis protein flhA |
| BU242 | argS | CDS | R | 271888 | 273612 | arginyl-tRNA synthetase |
| BU243 | rrs | rRNA | F | 274065 | 275524 | 16S rRNA |
| BU244 | tRNA-Ile | tRNA | F | 275637 | 275713 | tRNA-Ile (GAT) |
| BU245 | tRNA-Ala | tRNA | F | 275728 | 275800 | tRNA-Ala (TGC) |
| BU246 | gloB | CDS | R | 275795 | 276550 | probable hydroxyacylglutathione hydrolase |
| BU247 | rnhA | PS | R | 276591 | 277060 | ribonuclease hi (RNase hi) (ribonuclease H) (RNase |
| | | | | | | H) |
| BU248 | dnaQ | CDS | F | 277113 | 277826 | DNA polymerase III epsilon chain |
| BU249 | tRNA-Asp | tRNA | F | 277895 | 277968 | tRNA-Asp (GTC) |
| BU250 | lpcA | CDS | F | 278052 | 278633 | phosphoheptose isomerase |
| BU251 | gpt | CDS | F | 278770 | 279216 | xanthine-guanine phosphoribosyltransferase |
| BU252 | grpE1 | CDS | F | 279317 | 279901 | heat shock protein grpE 1 |
| BU253 | yfjF | CDS | R | 279980 | 280279 | hypothetical protein |
| BU254 | smpB | CDS | F | 280373 | 280861 | small protein B |
| BU255 | yfhC | CDS | F | 280870 | 281355 | hypothetical protein yfhC |
| BU256 | acpS | CDS | R | 281356 | 281736 | holo-[acyl-carrier protein] synthase |
| BU257 | era | CDS | R | 281861 | 282712 | GTP-binding protein era |
| BU258 | rnc | CDS | R | 282709 | 283389 | ribonuclease III |
| BU259 | lepB | CDS | R | 283520 | 284464 | signal peptidase I |
| BU260 | lepA | CDS | R | 284480 | 286312 | GTP-binding protein lepA |
| BU261 | trmU | CDS | F | 286436 | 287614 | tRNA (5-methylaminomethyl-2-thiouridylate)- |
| | | | | | | methyltransferase |
| BU262 | ycfC | CDS | F | 287650 | 288285 | hypothetical protein |
| BU263 | purB | CDS | F | 288324 | 289694 | adenylosuccinate lyase |
| BU264 | mitE | CDS | F | 289718 | 290383 | membrane-bound lytic murein transglycosylase E |
| BU265 | fabI | CDS | F | 290497 | 291279 | enoyl-[acyl-carrier-protein] reductase (NADH) |
| BU266 | rnb | CDS | F | 291466 | 293415 | exoribonuclease II |
| BU267 | ychE | CDS | F | 293524 | 294171 | hypothetical protein |
| BU268 | lipB | CDS | F | 294209 | 294844 | lipoate-protein ligase B |
| BU269 | lipA | CDS | F | 294963 | 295934 | lipoic acid synthetase |
| BU270 | pyrF | CDS | F | 296039 | 296749 | orotidine 5′-phosphate decarboxylase |
| BU271 | ribA | CDS | F | 296797 | 297381 | GTP cyclohydrolase II |
| BU272 | hns | CDS | R | 297485 | 297892 | DNA-binding protein H-ns |
| BU273 | cls | CDS | R | 298238 | 299698 | cardiolipin synthetase |
| BU274 | yciA | CDS | R | 300079 | 300486 | hypothetical protein |
| BU275 | yciB | CDS | R | 300523 | 301056 | hypothetical protein |
| BU276 | yciC | CDS | R | 301084 | 301827 | hypothetical protein |
| BU277 | trpA | CDS | R | 301932 | 302741 | tryptophan synthase alpha chain |
| BU278 | trpB | CDS | R | 302760 | 303926 | tryptophan synthase beta chain |
| BU279 | trpC | CDS | R | 303964 | 305325 | indole-3-glycerol phosphate synthase/N-(5′-phospho- |
| | | | | | | ribosyl)anthranilate isomerase |
| BU280 | rpD | CDS | R | 305306 | 306334 | anthranilate phosphoribosyltransferase |
| BU281 | yedA | CDS | F | 306569 | 307492 | hypothetical protein |
| BU282 | yciL | CDS | F | 307521 | 308273 | hypothetical protein |
| BU283 | sohB | CDS | F | 308270 | 309358 | possible protease sohB |
| BU284 | topA | CDS | F | 309445 | 312030 | DNA topoisomerase I |
| BU285 | suhB | CDS | R | 312083 | 312883 | extragenic suppressor protein suhB |
| BU286 | yfgB | CDS | F | 313130 | 314221 | hypothetical protein |
| BU287 | gcpE | CDS | F | 314272 | 315378 | gcpE protein |
| BU288 | hisS | CDS | F | 315404 | 316675 | histidyl-tRNA synthetase |
| BU289 | glyA | CDS | F | 316735 | 317988 | serine hydroxymethyltransferase |
| BU290 | bioD | CDS | R | 318076 | 318750 | dethiobiotin synthetase |
| BU291 | bioB | CDS | F | 320225 | 321511 | adenosylmethionine-8-amino-7-oxononanoate |
| | | | | | | aminotransferase |
| BU292 | bioA | CDS | F | 320225 | 321511 | adenosylmethiuonine-8-amino-7-oxononanoate |
| | | | | | | aminotransferase |
| BU293 | ybhE | CDS | R | 321520 | 322524 | hypothetical protein |
| BU294 | mfd | CDS | R | 322648 | 325086 | transcription-repair coupling factor |
| BU295 | ycfU | CDS | F | 325561 | 326760 | hypothetical protein |
| BU296 | ycfV | CDS | F | 326753 | 327439 | hypothetical ABC transporter ATP-binding protein ycfv |
| BU297 | ycfW | PS | F | 327457 | 328694 | hypothetical ABC transporter membrane component |
| | | | | | | ycfW |
| BU298 | gapA | CDS | F | 328764 | 329774 | glyceraldehyde 3-phosphate dehydrogenase A |
| BU299 | fldA | CDS | R | 330105 | 330620 | flavodoxin 1 |
| BU300 | phrB | CDS | F | 330827 | 332278 | deoxyribodipyrimidine photolyase |
| BU301 | ybgI | CDS | F | 332275 | 33018 | hypothetical protein |
| BU302 | sucA | CDS | F | 333143 | 335872 | 2-oxoglutarate dehydrogenasxe e1 component |
| BU303 | sucB | CDS | F | 335888 | 337150 | dihydrolipoamide succinyltransferase component (E2) |
| | | | | | | of 2-oxoglutarate dehydrogenase complex |
| BU304 | gpmA | CDS | F | 337248 | 337943 | phosphoglycerate mutase |
| BU305 | pfkA | CDS | F | 338127 | 339089 | 6-phosphofructokinase isozyme I |
| BU306 | glfF | CDS | F | 339155 | 339946 | glycerol uptake facilitator protein |
| BU307 | tpiA | CDS | R | 339955 | 340722 | triosephosphate isomerase |
| BU308 | himD | CDS | R | 340821 | 341105 | integration host factor beta-subunit |
| BU309 | rpsA | CDS | R | 341201 | 342877 | 30S ribosomal protein S1 |
| BU310 | cmk | PS | R | 343005 | 343660 | cytidylate kinase |
| BU311 | aroA | CDS | R | 343716 | 344999 | 3-phosphoshikimate 1-carboxyvinyltransferase |
| BU312 | serC | CDS | R | 345066 | 346151 | phosphoserine aminotransferase |
| BU313 | serS | CDS | R | 346190 | 347473 | seryl-tRNA synthetase |
| BU314 | trxB | CDS | F | 347821 | 348780 | thioredoxin reductase |
| BU315 | infA | CDS | F | 348887 | 349105 | translation initiation factor IF-1 |
| BU316 | aspS | CDS | F | 349274 | 351034 | aspartyl-tRNA synthetase |
| BU317 | znuB | CDS | R | 351045 | 351833 | high-affinity zinc uptake system membrane protein |
| | | | | | | ZnuB |
| BU318 | znuC | CDS | R | 351891 | 352607 | high-affinity zinc uptake system ATP-binding protein |
| | | | | | | ZnuC |
| BU319 | pykA | CDS | R | 353925 | 355367 | pyruvate kinase |
| BU320 | zwf | CDS | F | 355650 | 357125 | glucose-6-phosphate 1-dehydrogenase |
| BU321 | htpX | CDS | F | 357310 | 358188 | heat shock protein htpX |
| BU322 | cspC | CDS | F | 358537 | 358746 | cold shock-like protein cspC |
| BU323 | yoaE | CDS | F | 359049 | 360614 | hypothetical protein |
| BU324 | yeaZ | CDS | F | 360644 | 361309 | hypothetical protein |
| BU325 | minE | CDS | R | 361455 | 361706 | cell division topological specificity factor |
| BU326 | minD | CDS | R | 361710 | 362522 | septum site-determining protein minD |
| BU327 | minC | DCS | R | 362549 | 363262 | cell division inhibitor minC |
| BU328 | yjjT | CDS | F | 363663 | 364505 | hypothetical protein |
| BU329 | tRNA-Leu | tRNA | R | 364524 | 364607 | tRNA-Leu (TAA) |
| BU330 | tRNA-Cys | tRNA | R | 364619 | 364692 | tRNA-Pseudo (GCA) |
| BU331 | tRNA-Ser | tRNA | F | 364863 | 364947 | tRNA-Ser (TGA) |
| BU332 | ompA | CDS | R | 365056 | 366105 | outer membrane protein A precursor |
| BU333 | mviN | CDS | R | 366242 | 367777 | virulence factor mviN homolog |
| BU334 | pyrC | CDS | F | 368052 | 369104 | dihydroorotase |
| BU335 | flgN | CDS | R | 369124 | 369531 | flagella synthesis protein flgN |
| BU336 | flgA | CDS | R | 369604 | 370284 | flagella basal body P-ring formation protein flgA |
| | | | | | | precursor |
| BU337 | flgB | CDS | F | 370621 | 370968 | flagellar basal-body rod protein flgB |
| BU338 | flgC | CDS | F | 370977 | 371387 | flagellar basal-body rod protein flgC |
| BU339 | flgD | CDS | F | 371399 | 372109 | basal-body rod modification protein flgD |
| BU340 | flgE | CDS | F | 372159 | 373376 | flagellar hook protein flgE |
| BU341 | flgF | CDS | F | 373427 | 374161 | flagellar basal-body rod protein flgF |
| BU342 | flgG | CDS | F | 374179 | 374961 | flagellar basal-body rod protein flgG |
| BU343 | figH | CDS | F | 375045 | 375761 | flagellar L-ring protein precursor |
| BU344 | flgI | CDS | F | 375942 | 377099 | flagellar P-ring protein precursor |
| BU345 | flgJ | CDS | F | 377099 | 377398 | flagellar protein flgJ |
| BU346 | flgK | CDS | F | 377500 | 379131 | flagellar hook-associated protein 1 |
| BU347 | rne | CDS | R | 379296 | 382004 | ribonuclease E |
| BU348 | rluC | CDS | F | 382339 | 383283 | ribosomal large subunit pseudouridine synthase C |
| BU349 | rpmF | CDS | F | 383329 | 383493 | 50S ribosomal protein L32 |
| BU350 | fabD | PS | F | 383914 | 384872 | malonyl CoA-acyl carrier protein transacylase (MCT) |
| BU351 | fabG | CDS | F | 384859 | 385593 | 3-oxoacyl-[acyl-carrier protein] reductase |
| BU352 | acpP | CDS | F | 385670 | 385912 | acyl carrier protein |
| BU353 | tmk | CDS | F | 385983 | 386621 | thymidylate kinase |
| BU354 | holB | CDS | F | 386618 | 38759b | DNA polymerase III delta′ subunit |
| BU355 | ycfH | CDS | F | 387632 | 388426 | hypothetical protein |
| BU356 | ptsG | CDS | F | 388571 | 389956 | pts system glucose-specific IIBC component |
| BU357 | vcfF | CDS | F | 389976 | 390320 | hypothetical protein |
| BU358 | ycfM | CDS | F | 390397 | 390906 | hypothetical protein |
| BU359 | ompF | CDS | R | 391155 | 392303 | ompF-like porin |
| BU360 | asnS | CDS | R | 392443 | 393843 | asparaginyl-tRNA synthetase |
| BU361 | pncB | CDS | R | 393991 | 395190 | nicotinate phosphoribosyltransferase |
| BU362 | pyrD | CDS | F | 395612 | 396475 | dihydroorotate dehydrogenase |
| BU363 | ycbY | CDS | F | 396651 | 398756 | hypothetical protein |
| BU364 | uup | CDS | F | 398776 | 400566 | ABC transporter ATP-binding protein uup |
| BU365 | yceA | CDS | R | 400570 | 401544 | hypothetical protein |
| BU366 | valS | CDS | R | 401601 | 404468 | valyl-tRNA synthetase |
| BU367 | pepA | CDS | R | 404545 | 406044 | aminopeptidase A/I |
| BU368 | argF | CDS | F | 406304 | 407320 | ornithine carbamoyltransferase chain F |
| BU369 | pyrB | CDS | F | 407439 | 408371 | aspartate carbamoyltransferase catalytic chain |
| BU370 | pyrI | CDS | F | 408379 | 408843 | aspartate carbamoyltransferase regulatory chain |
| BU371 | yhaR | CDS | F | 408889 | 409275 | hypothetical protein |
| BU372 | deaD | CDS | R | 409362 | 411167 | ATP-dependent RNA helicase deaD |
| BU373 | pnp | CDS | R | 411548 | 413671 | polyribonucleotide nucleotidyltransfe |
| BU374 | rpsO | CDS | R | 413873 | 414142 | 30S ribosomal protein S15 |
| BU375 | truB | CDS | R | 414247 | 415185 | tRNA pseudouridine 55 synthase |
| BU376 | rbfA | CDS | R | 415223 | 415585 | ribosome-binding factor A |
| BU377 | infB | CDS | R | 415631 | 418225 | translation initiation factor IF-2 |
| BU378 | nusA | CDS | R | 418243 | 419733 | N utilization substance protein A |
| BU379 | tRNA-Leu | tRNA | R | 420072 | 420157 | tRNA-Leu (GAG) |
| BU380 | secG | CDS | R | 420206 | 420535 | protein-export membrane protein secG |
| BU381 | mrsA | CDS | R | 420797 | 422131 | mrsA protein |
| BU382 | hflB | CDS | R | 422351 | 424141 | cell division protein ftsh |
| BU383 | ftsJ | CDS | R | 424252 | 424872 | cell division protein ftsJ |
| BU384 | greA | CDS | R | 424946 | 425425 | transcription elongation factor greA |
| BU385 | yrbA | CDS | F | 425949 | 426191 | hypothetical protein |
| BU386 | murA | CDS | F | 426253 | 427503 | UDP-N-acetylglucosamine 1-carboxyvinyltransferase |
| BU387 | rplU | CDS | F | 427642 | 427968 | 50S ribosomal protein L21 |
| BU388 | rpmA | CDS | F | 427973 | 428227 | 50S ribosomal protein L27 |
| BU389 | yhbZ | CDS | F | 428379 | 429383 | hypothetical 43.3 kD GTP-binding protein in dacB- |
| | | | | | | rpmA intergenic region (F390) |
| BU390 | rpsI | CDS | R | 429451 | 429843 | 30S ribosomal protein S9 |
| BU391 | rplM | CDS | R | 429864 | 430292 | 50S ribosomal protein L13 |
| BU392 | pheA | CDS | F | 430544 | 431701 | chorismate mutase/prephenate dehydratase |
| BU393 | ffh | CDS | F | 431883 | 433238 | signal recognition particle protein |
| BU394 | rpsP | CDS | F | 433347 | 433586 | 30S ribosomal protein S16 |
| BU395 | rimM | CDS | F | 433588 | 434118 | 16s rRNA processing protein rimm |
| BU396 | trmD | CDS | F | 434133 | 434846 | tRNA (guanine-n1)-methyltransferase |
| BU397 | rplS | CDS | F | 434945 | 435292 | 50S ribosomal protein L19 |
| BU398 | t/dD | CDS | R | 435376 | 436827 | tldD protein |
| BU399 | aroD | CDS | F | 436965 | 437437 | type II 3-dehydroquinase |
| BU400 | fis | CDS | R | 437630 | 437926 | factor-for-inversion stimulation protein |
| BU401 | rluD | CDS | R | 438095 | 439033 | ribosomal large subunit pseudouridine synthase D |
| BU402 | yfiO | CDS | F | 439198 | 439938 | hypothetical protein |
| BU403 | alaS | CDS | F | 440103 | 442739 | alanyl-tRNA synthetase |
| BU404 | csrA | CDS | F | 442934 | 443107 | carbon storage regulator |
| BU405 | tRNA-Ser | tRNA | F | 443263 | 443354 | tRNA-Ser (GCT) |
| BU406 | tRNA-Arg | tRNA | F | 443372 | 443445 | tRNA-Arg (ACG) |
| BU407 | gshA | CDS | F | 443565 | 445121 | glutamate-cysteine ligase |
| BU408 | metK | CDS | R | 445268 | 446404 | S-adenosylmethionine synthetase |
| BU409 | endA | CDS | F | 446639 | 447391 | endonuclease I |
| BU410 | yggJ | CDS | F | 447363 | 448124 | hypothetical protein |
| BU411 | rp/A | CDS | R | 448198 | 448869 | ribose 5-phosphate isomerase A |
| BU412 | tRNA-Gln | tRNA | R | 449053 | 449127 | tRNA-Gln (TTG) |
| BU413 | tRNA-Leu | tRNA | R | 449220 | 449301 | tRNA-Leu (TAG) |
| BU414 | tRNA-Met | tRNA | R | 449313 | 449389 | tRNA-Met (CAT) |
| BU415 | glnS | CDS | F | 449495 | 451210 | glutaminyl-tRNA synthetase |
| BU416 | pyrG | CDS | F | 451384 | 453021 | CTP synthase |
| BU417 | eno | CDS | F | 453051 | 454355 | enolase |
| BU418 | nlpD | CDS | R | 454513 | 455517 | lipoprotein nipD precursor |
| BU419 | ygbB | CDS | R | 455608 | 456093 | hypothetical protein |
| BU420 | ygbP | CDS | R | 456109 | 456822 | hypothetical protein |
| BU421 | ygbQ | CDS | R | 456905 | 457120 | hypothetical protein |
| BU422 | cysC | CDS | R | 457178 | 457798 | adenylylsulfate kinase |
| BU423 | cysN | CDS | R | 457799 | 459220 | sulfate adenylate transferase subunit 1 |
| BU424 | cysD | CDS | R | 459239 | 460147 | sulfate adenylate transferase subunit 2 |
| BU425 | cysG | CDS | R | 460157 | 461578 | siroheme synthase/precorrin-2 oxidase/ |
| | | | | | | ferrochelatase |
| BU426 | cysH | CDS | R | 461917 | 462651 | phosphoadenosine phosphosulfate reductase |
| BU427 | cysI | CDS | R | 462667 | 464376 | sulfite reductase (NADPH) hemoprotein beta- |
| | | | | | | component |
| BU428 | cysJ | CDS | R | 464376 | 466181 | sulfite reductase (NADPH) flavoprotein alpha- |
| | | | | | | component |
| BU429 | mutS | CDS | R | 466372 | 468780 | DNA mismatch repair protein mutS |
| BU430 | dsbA | CDS | F | 468937 | 469575 | thiol:disulfide interchange protein dsbA precursor |
| BU431 | poiA | CDS | F | 469696 | 470556 | DNA polymerase I |
| BU432 | yihA | CDS | R | 470619 | 471236 | hypothetical GTP-binding protein |
| BU433 | typA | CDS | F | 471487 | 473310 | GTP-binding protein TypA/BipA |
| BU434 | gmk | CDS | R | 473433 | 474056 | guanylate kinase |
| BU435 | ygfZ | CDS | R | 474156 | 475115 | hypothetical protein |
| BU436 | prfB | CDS | F | 475334 | 476383 | peptide chain release factor 2 |
| BU437 | lysS | CDS | F | 476393 | 477913 | lysyl-tRNA synthetase |
| BU438 | lysA | CDS | F | 477979 | 479226 | diaminopimelate decarboxylase |
| BU439 | lgt | CDS | F | 479292 | 480137 | prolipoprotein diacylglyceryl transferase |
| BU440 | thyA | CDS | F | 480151 | 480945 | thymidylate synthase |
| BU441 | yleA | CDS | F | 481012 | 482331 | hypothetical protein |
| BU442 | ybeY | CDS | F | 482486 | 482821 | hypothetical protein |
| BU443 | ybeX | CDS | F | 482902 | 483777 | hypothetical protein |
| BU444 | leuS | CDS | F | 483881 | 486460 | leucyl-tRNA synthetase |
| BU445 | holA | CDS | F | 486500 | 487495 | DNA polymerase III delta subunit |
| BU446 | ybeN | CDS | F | 487518 | 488162 | hypothetical protein |
| BU447 | yhhP | CDS | F | 488223 | 488453 | hypothetical protein |
| BU448 | asd | CDS | R | 488600 | 489715 | aspartate-semialdehyde dehydrogenase |
| BU449 | yhgN | CDS | F | 490053 | 490601 | hypothetical protein |
| BU450 | pgk | CDS | F | 490715 | 491887 | phosphoglycerate kinase |
| BU451 | fba | CDS | F | 491903 | 492979 | tructose-bisphosphate aldolase |
| BU452 | yggB | CDS | F | 493043 | 493960 | hypothetical protein |
| BU453 | recC | CDS | F | 494019 | 497231 | exodeoxyribonuclease V 125 kD polypeptide |
| BU454 | recB | CDS | F | 497248 | 500772 | exodeoxyribonuclease V 135 kD polypeptide |
| BU455 | recD | CDS | F | 500778 | 502586 | exodeoxyribonuclease V 67 kD polypeptide |
| BU456 | argA | CDS | R | 502625 | 503953 | amino-acid acetyltransferase |
| BU457 | tRNA-Met | tRNA | R | 504133 | 504209 | tRNA-Met (CAT) |
| BU458 | mltA | CDS | F | 504321 | 505400 | membrane-bound lytic murein transglycosylase A |
| | | | | | | precursor |
| BU459 | ribH | CDS | F | 505439 | 505921 | 6,7-dimethyl-8-ribityllumazine synthase |
| BU460 | thiL | CDS | F | 505951 | 506922 | thiamin-monophosphate kinase |
| BU461 | ribD1 | CDS | F | 506978 | 507403 | riboflavin deaminase |
| BU462 | ribD2 | CDS | F | 507446 | 508069 | riboflavin reductase |
| BU463 | nusB | CDS | F | 508106 | 508537 | N utilization substance protein B |
| BU464 | dxs | CDS | R | 508592 | 510418 | dxs protein |
| BU465 | ispA | CDS | R | 510476 | 511324 | geranyltranstransferase |
| BU466 | yajR | CDS | R | 511376 | 512548 | hypothetical protein |
| BU467 | yccK | CDS | F | 512622 | 512966 | hypothetical protein |
| BU468 | cyoE | CDS | R | 512987 | 513844 | protohaeme IX farnesyltransferase |
| BU469 | cyoD | CDS | R | 513872 | 514189 | cytochrome o ubiquinol oxidase subunit IV |
| BU470 | cyoC | CDS | R | 514189 | 514806 | cytochrome 0 ubiquinol oxidase subunit III |
| BU471 | cyoB | CDS | R | 514803 | 516791 | cytochrome o ubiquinol oxidase subunit I |
| BU472 | cyoA | CDS | R | 516796 | 517686 | cytochrome o ubiquinol oxidase subunit II |
| BU473 | bolA | CDS | F | 517985 | 518299 | bolA protein |
| BU474 | tig | CDS | F | 518435 | 519763 | trigger factor |
| BU475 | clpP | CDS | F | 519898 | 520524 | ATP-dependent clp protease proteolytic subunit |
| BU476 | clpX | CDS | F | 520623 | 521912 | ATP-dependent clp protease ATP-binding subunit clpX |
| BU477 | lon | CDS | F | 522104 | 524437 | ATP-dependent protease La |
| BU478 | pplD | CDS | F | 524579 | 526450 | peptidyl-prolyl cis-trans isomerase D |
| BU479 | mdl | CDS | F | 527423 | 529192 | multidrug resistance-like ATP-binding protein mdl |
| BU480 | mdlB | CDS | F | 529164 | 530936 | mdlB |
| BU481 | dnaX | CDS | F | 531231 | 532316 | DNA polymerase III subunits gamma and tau |
| BU482 | ybaB | CDS | F | 532636 | 532965 | hypothetical protein |
| BU483 | htpG | CDS | F | 533111 | 534985 | heat shock protein htpG |
| BU484 | adk | CDS | F | 535058 | 535705 | adenylate kinase |
| BU485 | tRNA-Arg | tRNA | R | 535708 | 535781 | tRNA-Arg (TCT) |
| BU486 | folD | CDS | F | 535936 | 536793 | methylenetetrahydrofolate dehydrogenase/ |
| | | | | | | methenyltetrahydrofolate cyclohydrolase |
| BU487 | cysS | CDS | R | 536790 | 538184 | cysteinyl-tRNA synthetase |
| BU488 | ybeD | CDS | F | 538445 | 538708 | hypothetical protein |
| BU489 | cspE | CDS | R | 538815 | 539024 | cold shock-like protein cspE |
| BU490 | rrf | rRNA | R | 539312 | 539426 | 5S rRNA |
| BU491 | rrl | rRNA | R | 539539 | 542451 | 23S rRNA |
| BU492 | tRNA-Glu | tRNA | R | 542613 | 542685 | tRNA-Glu (TTC) |
| BU493 | aroE | 00$ | R | 542838 | 543659 | shikimate 5-dehydrogenase |
| BU494 | yrdC | CDS | R | 543652 | 544179 | hypothetical protein |
| BU495 | smg | CDS | R | 544277 | 544750 | smg protein |
| BU496 | def | CDS | F | 544994 | 545515 | polypeptide deformylase |
| BU497 | fmt | CDS | F | 545523 | 546467 | methionyl-tRNA formyltransferase |
| BU498 | rplQ | CDS | R | 546594 | 546986 | 50S ribosomal protein L17 |
| BU499 | rpoA | CDS | R | 547031 | 548020 | DNA-directed RNA polymerase alpha chain |
| BU500 | rpsD | CDS | R | 548049 | 548669 | 30S ribosomal protein S4 |
| BU501 | rpsK | CDS | R | 548695 | 549090 | 30S ribosomal protein S11 |
| BU502 | rpsM | CDS | R | 549108 | 549464 | 30S ribosomal protein S13 |
| BU503 | rpmJ | CDS | R | 549558 | 549674 | 50S ribosomal protein L36 |
| BU504 | secY | CDS | R | 549700 | 551013 | preprotein translocase secY subunit |
| BU505 | rplO | CDS | R | 551024 | 551458 | 50S ribosomal protein L15 |
| BU506 | rpmD | CDS | R | 551463 | 551642 | 50S ribosomal protein L30 |
| BU507 | rpsE | CDS | R | 551652 | 552155 | 30S ribosomal protein S5 |
| BU508 | rplR | CDS | R | 552171 | 552539 | 50S ribosomal protein L18 |
| BU509 | rplF | CDS | R | 552541 | 553113 | 50S ribosomal protein L6 |
| BU510 | rpsH | CDS | R | 553088 | 553480 | 30S ribosomal protein S8 |
| BU511 | rpsN | CDS | R | 553509 | 553814 | 30S ribosomal protein S14 |
| BU512 | rplE | CDS | R | 553832 | 554371 | 50S ribosomal protein L5 |
| BU513 | rplX | CDS | R | 554386 | 554700 | 50S ribosomal protein L24 |
| BU514 | rplN | CDS | R | 554726 | 555094 | 50S ribosomal protein L14 |
| BU515 | rpsQ | CDS | R | 555209 | 555460 | 30S ribosomal protein S17 |
| BU516 | rpmC | CDS | R | 555460 | 555657 | 50S ribosomal protein L29 |
| BU517 | rplP | CDS | R | 555657 | 556067 | 50S ribosomal protein L16 |
| BU518 | rpsC | CDS | R | 556088 | 556789 | 30S ribosomal protein S3 |
| BU519 | rplV | CDS | R | 556808 | 557140 | 50S ribosomal protein L22 |
| BU520 | rpsS | CDS | R | 557176 | 557454 | 30S ribosomal protein S19 |
| BU521 | rplB | CDS | R | 557474 | 558295 | 50S ribosomal protein L2 |
| BU522 | rplW | CDS | R | 558310 | 558612 | 50S ribosomal protein L23 |
| BU523 | rplD | CDS | R | 558609 | 559214 | 50S ribosomal protein L4 |
| BU524 | rplC | CDS | R | 559232 | 559861 | 50S ribosomal protein L3 |
| BU525 | rpsJ | CDS | R | 559892 | 560203 | 30S ribosomal protein S10 |
| BU526 | tufB | CDS | R | 560535 | 561806 | elongation factor EF-Tu |
| BU527 | fusA | CDS | R | 561787 | 563895 | elongation factor G |
| BU528 | rpsG | CDS | R | 564010 | 564480 | 30S ribosomal protein S7 |
| BU529 | rpsL | CDS | R | 564522 | 564896 | 30S ribosomal protei |
| BU530 | yheL | CDS | R | 565030 | 565302 | hypothetical pr |
| BU531 | yheM | CDS | R | 565329 | 565688 | hypothetical pr |
| BU532 | yheN | CDS | R | 56S707 | 566093 | hypothetical pr |
| BU533 | fkpA | CDS | R | 566176 | 566901 | fkbp-type peptidyl-prolyl cis-trans isomerase fkpA |
| | | | | | | precursor |
| BU534 | argD | CDS | R | 567364 | 568590 | acetylornithine aminotransferase |
| BU535 | yhfC | CDS | F | 568906 | 570072 | hypothetical protein |
| BU536 | trpS | CDS | R | 670134 | 571141 | tryptophanyl-tRNA synthetase |
| BU537 | rpe | CDS | R | 571164 | 571850 | ribulose-phosphate 3-epimerase |
| BU538 | aroB | CDS | R | 572734 | 573825 | 3-dehydroquinate synthase |
| BU539 | aroK | CDS | R | 573843 | 574364 | shikimate kinase I |
| BU540 | tRNA-Ser | tRNA | F | 574863 | 574947 | tRNA-Ser (GGA) |
| BU541 | deoD | CDS | R | 574967 | 575671 | purine nucleoside phosphorylase |
| BU542 | deoB | CDS | R | 575715 | 576938 | phosphopentomitase |
| BU543 | prfC | CDS | R | 576996 | 578576 | peptide chain release factor 3 |
| BU544 | yhgI | CDS | R | 579687 | 580265 | hypothetical protein |
| BU545 | ssb | CDS | R | 580878 | 581393 | single-strand binding protein |
| BU546 | dnaB | CDS | F | 582081 | 583460 | replicative DNA helicase |
| BU547 | gshB | CDS | F | 583707 | 584669 | glutathione synthetase |
| BU548 | yqgF | CDS | F | 584680 | 585087 | hypothetical protein |
| BU549 | yggS | CDS | F | 585205 | 585807 | hypothetical protein |
| BU550 | yggW | CDS | F | 585860 | 586980 | hypothetical protein |
| BU551 | yggH | CDS | R | 586987 | 587706 | hypothetical protein |
| BU552 | mutY | CDS | F | 587804 | 588856 | A/G-specific adenine glycosylase |
| BU553 | yggX | CDS | F | 588828 | 589109 | hypothetical protein |
| BU554 | muri | CDS | F | 589203 | 589991 | glutamate racemase |
| BU555 | sbcB | CDS | R | 590182 | 591423 | exodeoxyribonuclease I |
| BU556 | yeeX | CDS | F | 591503 | 591811 | hypothetical protein |
| BU557 | tRNA-Asn | tRNA | R | 591818 | 591890 | tRNA-Asn (GTT) |
| BU558 | tRNA-Met | tRNA | F | 592025 | 592097 | tRNA-Met (CAT) |
| BU559 | pyrE | CDS | F | 592193 | 592834 | orotate phosphoribosyltransferase |
| BU560 | dut | CDS | R | 592846 | 593310 | deoxyuridine 5′-triphosphate nucleotidohydrolase |
| BU561 | cysQ | CDS | R | 593354 | 594151 | cysQ protein |
| BU562 | rpll | CDS | R | 594138 | 594590 | 50S ribosomal protein L9 |
| BU563 | rpsR | CDS | R | 594639 | 594866 | 30S ribosomal protein S18 |
| BU564 | rpsF | CDS | R | 594992 | 595333 | 30S ribosomal protein S6 |
| BU565 | vacB | CDS | R | 595499 | 597736 | vacB protein |
| BU566 | purA | CDS | R | 597824 | 599125 | adenylosuccinate synthetase |
| BU567 | hflC | CDS | R | 599175 | 600107 | hflC protein |
| BU568 | hflK | CDS | R | 600110 | 601330 | hflK protein |
| BU569 | miaA | CDS | R | 601487 | 602395 | tRNA delta(2)-isopentenylpyrophosphate transferase |
| BU570 | mutL | CDS | R | 602433 | 604187 | DNA mismatch repair protein mutL |
| BU571 | mtlD | CDS | R | 604287 | 605444 | mannitol-1-phosphate 5-dehydrogenase |
| BU572 | mtlA | CDS | R | 605486 | 607384 | pts system mannitol-specific II ABC component |
| BU573 | pgi | CDS | R | 607559 | 609208 | glucose-6-phosphate isomerase |
| BU574 | orn | CDS | F | 609522 | 610076 | oligoribonuclease |
| BU575 | tRNA-Gly | tRNA | F | 610162 | 610237 | tRNA-Gly (gcc) |
| BU576 | amiB | CDS | F | 610528 | 611241 | N-acetylmuramoyl-L-alanine amidase precursor |
| BU577 | rpmE | CDS | R | 611349 | 611567 | 50S ribosomal protein L31 |
| BU578 | hslV | CDS | F | 612173 | 612685 | heat shock protein hslV |
| BU579 | hslU | CDS | F | 612698 | 614029 | heat shock protein hslU |
| BU580 | ibpA | CDS | F | 614236 | 614709 | 16 kD heat shock protein A |
| BU581 | fpr | CDS | F | 614786 | 615544 | ferredoxin-NADP reductase |
| BU582 | yjeA | CDS | R | 615562 | 616536 | hypothetical lysyl-tRNA synthetase homolog |
| BU583 | kdtB | CDS | F | 616608 | 617105 | lipopolysaccharide core biosynthesis protein kdtB |
| BU584 | yba3 | CDS | R | 617192 | 618295 | hypothetical protein |
| BU585 | yba4 | CDS | R | 618288 | 618626 | hypothetical protein |
| BU586 | yhiQ | CDS | F | 618781 | 619521 | hypothetical protein |
| BU587 | pitA | CDS | R | 619604 | 621076 | low-affinity inorganic phosphate transporter |
| BU588 | ynfM | CDS | R | 621227 | 622459 | hypothetical protein |
| BU589 | dapF | CDS | R | 622493 | 623410 | diaminopimelate epimerase |
| BU590 | cyaY | CDS | F | 623535 | 623885 | cyaY protein |
| BU591 | hemC | CDS | F | 624014 | 624958 | porphobilinogen deaminase |
| BU592 | hemD | PS | F | 624955 | 625712 | uroprophyrinogen-III synthase |
| BU593 | tRNA-Pro | tRNA | R | 625716 | 625792 | tRNA-Pro (TGG) |
| BU594 | tRNA-His | tRNA | R | 625829 | 625904 | tRNA-His (GTG) |
| BU595 | rho | CDS | R | 625934 | 626007 | tRNA-Arg (CCG) |
| BU596 | rho | CDS | R | 626196 | 627455 | transcription termination factor rho |
| BU597 | trxA | CDS | R | 627585 | 627911 | thioredoxin |
| BU598 | rep | CDS | R | 628113 | 630050 | ATP-dependent DNA helicase Rep |
| BU599 | ilvC | CDS | R | 630120 | 631592 | ketol-acid reductoisomerase |
| BU600 | ilvD | CDS | R | 631640 | 633493 | dihydroxy-acid dehydratase |
| BU601 | tRNA-Trp | tRNA | R | 633734 | 633807 | tRNA-Trp (CCA) |
| BU602 | yfhO | CDS | F | 633980 | 635194 | hypothetical protein |
| BU603 | iscU | CDS | F | 635225 | 635608 | hypothetical protein iscU |
| BU604 | hscB | CDS | F | 635703 | 636227 | chaperone protein hscB |
| BU605 | hscA | CDS | F | 636239 | 638074 | heat shock protein hscA |
| BU606 | fdx | CDS | F | 638074 | 638409 | ferredoxin 2fe-2s |
| BU607 | yfgK | CDS | R | 638406 | 639767 | hypothetical GTP-binding protein |
| BU608 | yfgM | CDS | R | 639860 | 640441 | hypothetical protein |

[0026] Next, each nucleotide sequence or its complementary sequence of the genes located between start points to end points of Table 1 is determined. Once the sequence has been determined, each of the genes can be obtained by chemical synthesis, by PCR using a nucleotide sequence at 5′ or 3′ end of the gene as a primer and using the whole or a part of genomic DNA (SEQ ID NO:1) as a template, or by hybridization using a nucleotide sequence of the gene described in Table 1 or DNA fragment having its complementary sequence thereof as a probe.

[0027] The genes of the present invention also include a gene hybridizing to the above-mentioned DNA under stringent conditions and encoding a protein having the same function as that of a product (a substance encoded by a sequence from “Start point” to “End point” in Table 1) expressed by the DNA.

[0028] The term “stringent conditions” means conditions by which specific hybrids are produced and non-specific hybrids are not produced. That is, DNAs that share high homology (60% or more homology, preferably 80% or more homology) hybridize to each other in such conditions. More specifically, sodium concentration ranges from 150 to 900 mM, preferably 600 to 900 mM, and temperature ranges from 60 to 68° C., preferably 65° C.

[0029] In addition to the above-described genomic DNA, plasmids can also be isolated from Buchnera sp. in this invention.

[0030] Plasmids of this invention can be prepared in the same manner as for genomic DNA. Nucleotide sequences of the plasmids of this invention are also determined simultaneously with the genomic chromosome by the above-mentioned shotgun sequencing.

[0031] Two types of the plasmids, pLeu and pTrp, are obtained as described above, each containing a self-replication sequence derived from Buchnera sp. The plasmids have the following sequences and possess features as shown in Table 2. Table 2 shows 11 genes contained in nucleotide sequences of the plasmids represented by SEQ ID NOS: 2 and 3.

[0032] pLeu (leucine plasmid): SEQ ID NO:2

[0033] pTrp (tryptophan plasmid): SEQ ID NO:3

TABLE 2

| | | | | Start | End | |
|---|---|---|---|---|---|---|
| | Gene | | Orienta- | point | point | |
| ID | name | Type | tion | (bp) | (bp) | Description |
| pLeu | | | | | | |
| plasmid | | | | | | |
| BUpL01 | repA1 | CDS | R | 346 | 1197 | putative replication- |
| | | | | | | associated protein |
| | | | | | | RepA1 |
| BUpL02 | yqhA | CDS | F | 1514 | 2017 | putative membrane- |
| | | | | | | associated protein |
| BUpL03 | repA2 | CDS | F | 2357 | 2893 | putative replication- |
| | | | | | | associated protein |
| | | | | | | RepA2 |
| BUpL04 | leuA | CDS | F | 3032 | 4591 | 2-isopropylmalate |
| | | | | | | synthase |
| BUpL05 | leuB | CDS | F | 4652 | 5743 | 3-isopropylmalate |
| | | | | | | dehydrogenase |
| BUpL06 | leuC | CDS | F | 5733 | 7160 | 3-isopropylmalate |
| | | | | | | dehydratase |
| BUpL07 | leuD | CDS | F | 7163 | 7786 | 3-isopropylmalate |
| | | | | | | dehydratase small |
| | | | | | | subunit |
| pTrp | | | | | | |
| plasmid | | | | | | |
| BUpT01 | trpE | CDS | F | 1 | 1566 | anthranilate |
| | | | | | | synthase large |
| | | | | | | subunit |
| BUpT02 | trpG | CDS | F | 1569 | 2171 | anthranilate |
| | | | | | | synthase small |
| | | | | | | subunit |
| BUpT03 | trpE2 | PS | F | 3629 | 5122 | anthranilate |
| | | | | | | synthase large |
| | | | | | | subunit |
| BUpT04 | trpG2 | CDS | F | 5199 | 5801 | anthranilate |
| | | | | | | synthase small |
| | | | | | | subunit |

[0034] In Table 2, each column of “Orientation,” “Type,” “Start point,” and “End point” represent the same as described in Table 1.

[0035] The plasmids of the present invention also include those containing DNA, capable of hybridizing to DNA comprising a nucleotide sequence of SEQ ID NO: 2 or 3 under stringent conditions, and self-replicating, in addition to those containing DNA comprising a nucleotide sequence of SEQ ID NO:2 or 3. The term “stringent conditions” can be defined as described above.

[0036] 2. Construction of a recombinant vector and a transformant

[0037] Recombinant vectors of this invention can be obtained by ligating the above gene to an appropriate vector. A transformant can be obtained by introducing the recombinant vector of this invention into a host so that a gene of interest can be expressed.

[0038] Examples of vectors include phages or plasmids, which can autonomously replicate in host microorganisms. Examples of plasmid DNA include plasmids derived from Escherichia coli (for example, pBR322, pBR325, pUC118, pUC119, pUC18, and pUC19), plasmids derived from Bacillus subtilis (for example, pUB110, and pTP5), plasmids derived from yeast (for example, YEp13, YEp24, and YCp50). Examples of phage DNA include λ phage (Charon4A, Charon21A, EMBL3, EMBL4, λgt10, λgt11, and λZAP). Further, examples of vectors also include animal viruses, such as retro virus and vaccinia virus, and insect viruses, such as baculo virus.

[0039] To insert the gene of this invention into a vector, for example, purified DNA is cleaved with an appropriate restriction enzyme and inserted to a restriction enzyme site or multicloning site of an appropriate vector DNA so as to ligate to the vector.

[0040] The gene of this invention must be incorporated into a vector in order to exhibit its function. A promoter and the gene of this invention can be ligated to the vector of this invention. If necessary, a cis element, such as an enhancer, a splicing signal, a poly A addition signal, a selection marker, a ribosome binding sequence (SD sequence) can also be integrated to the vector. Examples of selection markers include dihydrofolic acid reducing enzyme gene, ampicillin-resistant gene, neomycin-resistant gene. In addition to vectors capable of replicating autonomously in two or more types of host microorganisms, such as Escherichia coli and Bacillus brevis, various shuttle vectors can be used. Fragments of the vectors can also be obtained by cleaving with the above-mentioned restriction enzymes.

[0041] To ligate a DNA fragment to a vector fragment, a known DNA ligase is used. After annealing, a DNA fragment is ligated to a vector fragment so as to construct a recombinant vector.

[0042] Hosts used for transformation are not specifically limited so far as they can express the gene of this invention. Examples of the host cells include bacteria belonging to the genera Escherichia, such as Escherichia coli, the genera Bacillus, such as Bacillus subtilis, and the genera Pseudomonas, such as Pseudomonas putida, yeasts such as Saccharomyces cerevisiae and Schizosaccharomyces pombe, animal cells, such as COS and CHO cells, and insect cells, such as Sf9.

[0043] When a bacterium such as Escherichia coli is used as a host cell, a preferable recombinant vector can autonomously replicate in the bacterium and comprises a promoter, a ribosome binding sequence, the gene of this invention, and a transcription termination sequence. The recombinant vector may also contain a gene to regulate a promoter.

[0044] Examples of Escherichia bacteria include, E. coli DH5α and Bacillus bacteria include Bacillus subtilis, but not limited thereto.

[0045] Any promoter that can be expressed in a host cell may be used. Examples of such a promoter include promoters derived from Escherichia coli or phages, such as trp promoter, lac promoter, PL promoter, and PR promoter. Artificially designed and modified promoters, such as tac promoter may also be used.

[0046] Any method to introduce recombinant vectors into bacteria, that is, to introduce DNA into bacteria may be used and is not specifically limited. Examples of such methods include a method using calcium ion, electroporation and the like.

[0047] When yeast is used as a host cell, Saccharomyces cerevisiae, Schizosaccharomyces pombe and the like are used. In this case, promoters used herein are not specifically limited so far as they can express in yeast. Examples of such a promoter include gal 1 promoter, gal 10 promoter, heat shock protein promoter, MFα1 promoter, PH05 promoter, PGK promoter, GAP promoter, ADH promoter, and AOX1 promoter.

[0048] Methods to introduce recombinant vectors into yeast are not specifically limited. Any method to introduce DNA into yeast may be used. Examples of such methods include electroporation (Becker, D. M. et al., Methods. Enzymol., 194: 182, 1990), spheroplast method (Hinnen, A. et al., Proc. Natl. Acad. Sci., USA, 75, 1929, 1978), lithium acetate method (Itoh, H., J. B acteriol., 153, 163, 1983) and the like.

[0049] When an animal cell is used as a host cell, examples of host cells include mouse cells COS-7, Vero, Chinese hamster ovarian cells (CHO cells), mouse L cells, rat GH3, and human FL cells. Examples of promoters include SRα promoter, SV40 promoter, LTR promoter, and CMV promoter. In addition, an initial gene promoter of human cytomegalovirus may also be used. Examples of methods of introducing recombinant vectors into animal cells include electroporation, calcium phosphate transfection and lipofection.

[0050] When an insect cell is used as a host cell, Sf9 cells and the like are used. Examples of methods of introducing recombinant vectors into insect cells include calcium phosphate transfection, lipofection, and electroporation.

[0051] 3. Production of useful substances

[0052] A whole or a part of the genes of the present invention, or a whole genomic DNA can be used as basic data for DNA analysis based on a simple metabolic system of Buchnera. For example, analysis made on function of genomic DNA having a nucleotide sequence of SEQ ID NO:1 or function of at least one gene out of genes shown in Table 1 provides genetic information involving the metabolic system. Such genetic information can be used for development of pesticides, which can suppress the growth of Buchnera by inhibiting specifically a part of the metabolic pathway of Buchnera.

[0053] Though aphids feed on plant sieve tube fluid, which is deficient in nutrients other than sugar, they have extremely strong fertility. This is because Buchnera supply nutrients (including essential amino acids, vitamin B and other unknown nutrients), which aphids cannot synthesize. Accordingly, the genomic data of Buchnera should contain useful genes encoding the above nutrients. That is, useful substances can be produced by expressing these genes.

[0054] Proteins of interest (useful substances) can be obtained in this invention by culturing the aforementioned transformants containing genes of interest and collecting the protein from the culture products. Here the term “culture product” means either culture supernatants, or culture cells or culture bacteria, or disrupted cells or bacteria.

[0055] The transformants of this invention are cultured in/on media by normal techniques employed for culturing hosts.

[0056] A medium for culturing transformants obtained by using microorganisms including Escherichia coli, yeast and the like as hosts contains a carbon source, a nitrogen source, and inorganic salts, which the microorganisms can assimilate, and allows the transformant to grow efficiently. Either natural media or synthetic media can be used if they satisfy the above conditions.

[0057] Examples of carbon sources include glucose, fructose, sucrose, and carbohydrates e.g., starch, organic acids e.g., acetic acid and propionic acid, and alcohol e.g., ethanol and propanol. Examples of nitrogen sources include ammonia, salts of inorganic acids or organic acids, e.g., ammonium chloride, ammonium sulfate, ammonium acetate, and ammonium phosphate, other nitrogen-containing compounds, peptone, meat extract, and corn steep liquor. Examples of inorganic substances include potassium primary phosphate, potassium secondary phosphate, magnesium phosphate, magnesium sulfate, sodium chloride, ferrous sulfate, manganese sulfate, copper sulfate, and calcium carbonate.

[0058] Culturing is performed by shaking culture or submerged aeration-agitation culture under aerobic conditions at 37° C. for 6 to 24 hours. The pH is kept within a range from 7.0 to 7.5 while culturing. The pH is adjusted using inorganic or organic acid, alkaline solutions or the like.

[0059] If necessary, an antibiotics e.g., ampicillin or tetracycline may be added to the media while culturing.

[0060] When microorganisms transferred with the expression vectors using inducible promoters are cultured, inducers may be added to the media if necessary. For example, isopropyl-β-D-thiogalactopyranoside (IPTG) or the like may be added to the media when microorganisms transferred with the expression vectors containing lac promoter are cultured; indoleacrylic acid (IAA) or the like may be added when microorganisms transferred with the expression vectors containing trp promoter are cultured.

[0061] The media for culturing transformants obtained by using animal cells as host cells include generally used RPMI1640 media, DMEM media, or those to which fetal calf serum or the like is added. Normally, the transformant is cultured in the presence of 5% CO₂ for 1 to 30 days at 37° C. If necessary, antibiotics e.g., kanamycin and penicillin may be added to the medium while culturing.

[0062] When the protein of interest is produced within a bacterium or a cell, the protein is extracted by disrupting the bacterium or the cell. Further, when the protein of interest is produced outside a bacterium or extracellularly, the culture solution is used as it is or the bacterium or the cell is removed by centrifugation. Then the protein of interest can be isolated and purified from the aforementioned culture product by using appropriate combination of one or more of general biochemical techniques for isolation and purification of proteins, including ammonium sulfate precipitation, gel chromatography, ion exchange chromatography, and affinity chromatography.

[0063] Whether the protein of interest is obtained or not can be confirmed by SDS-polyacrylamide gel electrophoresis or the like.

### Sequence Listing Free Text

[0064] SEQ ID NO:4 Synthetic DNA

[0065] SEQ ID NO:5 Synthetic DNA

[0066] SEQ ID NO:6 Synthetic DNA

[0067] SEQ ID NO:7 Synthetic DNA

### BRIEF DESCRIPITION OF DRAWINGS

[0068] FIG. 1 is a photograph of SDS-polyacrylamide gel electrophoresis showing the purification results of DnaK protein.

### EXAMPLE

[0069] The invention will now be described by way of examples, but the technical scope of this invention shall not be limited by the examples.

### Example 1

### Genomic DNA of Buchnera sp.

[0070] (1) Isolation of Buchenra cells from aphids

[0071] Acyrthosiphon pisum (Harris) was dissected in buffer A (35 mM Tris-HCl (pH 7.5) 25 mM KCl, 10 mM MgCl₂, 250 mM sucrose) and the bacteriocytes were collected. The bacteriocytes were crushed by pipetting in buffer A and subjected to filtration through 5 μm pore size filter (Millipore corporation), thereby isolating Buchnera cells.

[0072] (2) Whole genome shotgun sequencing

[0073] Genomic DNA was isolated and prepared by a standard phenol/chloroform protocol.

[0074] Next, the sequence of the genomic DNA was determined by the whole genome shotgun sequencing. This method is same as that of Fleischmann et al., (Fleischmann, R. D. et al. Whole-genome random sequencing and assembly of Haemophilus influenzae Rd. Science 269, 496-512, 1995) except that some modifications were made (Partial fill-in method was employed) to avoid chimera formation upon the construction of libraries.

[0075] The isolated genomic DNA 15 μg was treated with SauAI 2U in 120 μl of reaction solution for 40 minutes at 37° C. resulting in limited digestion of the genomic DNA. The product was subjected to electrophoresis, and portions corresponding to 1.5 to 6 kb were cut out together with agarose gel, and DNAs were purified using a GENECLEAN kit (BIO101). The fragment digested with Sau3AI has a GATC overhang end at the 5′ end. These fragments are treated with Klenow enzyme (Takara) in the presence of dGTP and dATP for 15 minutes at 37° C. so that A and G bases are polymerized to form 5′-overhang with GA. Such a method in which the bases of an overhang end are partially polymerized is called Partial fill-in method. A cloning vector used herein was pSFI-CV1. For more information on the Partial fill-in method and the vector pSFI-CV1, please refer to Hattori et al's paper (Hattori, M. et al. A novel method for making nested deletions and its application for sequencing of a 300 kb region of human APP locus. Nucleic Acids Res. 25, 1802-1808, 1997).

[0076] This vector was treated with SalI restriction enzyme for 2 hours at 37° C. After ethanol precipitation, the product was treated by the Partial fill-in method. The SalI fragment has an AGCT overhang end at the 3′ end. Treatment of the SalI fragment in the presence of dTTP and dCTP results in the formation of CT end. Hence it becomes complementary to the terminal of the pretreated genomic DNA fragment so as to make ligation possible and avoid chimera formation. The products were treated with a DNA ligation kit ver. 2 (Takara) for 18 hours at 15° C., so that the genomic fragments were inserted into the vectors. The products were transformed into Escherichia coli DH5α competent cells (Takara). The ampicillin-resistant colonies were picked up and subjected to PCR to confirm that the genomic DNA fragments had been directly inserted. Primers used herein are as follows.

| | |
|---|---|
| LR: 5′-TCCGGCTCGTATGTTGTGTGGA-3′ | (SEQ ID NO:4) |
| LL: 5′-GTGCTGCAAGGCGATTAAGTTGG-3′ | (SEQ ID NO:5) |

[0077] PCR was performed for 30 cycles of 96° C. for 15 seconds and 68° C. for 3 minutes followed by one cycle at 70° C. for 10 minutes in the following reaction composition.

| | | |
|---|---|---|
| 10 x buffer | 2.5 | μl |
| 2.5 mM dNTP | 2.5 | μl |
| Primer LR (3.2 pmol) | 0.25 | μl |
| Primer LL (3.2 pmol) | 0.25 | μl |
| Takara ExTaq | 0.1 | μl |
| Total | 25 | μl |

[0078] The resulting PCR products were treated with alkaline phosphatase/exonuclease using a PCR product pre-sequencing kit (Amersham LIFE SCIENCE) and used as templates for sequencing. Sequencing reaction was performed using a commercial kit (ABI PRISM BigDye™ Terminator cycle sequencing Kits, dRhodoamine Terminator cycle sequencing kit, BigDye™ Primer Cycle Sequencing Kits, PE Biosystems) according to the manufacturer's protocols. Sequencing primers used herein were M13 forward or reverse primers. Sequencing was performed using ABI 377DNA sequencer (PE Biosystems). To determine a whole nucleotide sequence of Buchnera genome, approximately 10,000 sequencing reactions were needed. The sequence data from approximately 10,000 DNA fragments were reconstructed (by aligning, overlapping and connecting sequence fragments) on the UNIX workstation using phred, phrap, and consed computer programs (University of Washington).

[0079] The plasmid DNA of this invention can also be isolated and its nucleotide sequence can be determined in the same manner as employed for the genomic DNA by the whole genome shotgun sequencing.

[0080] (3) Identification of genes

[0081] Two strategies were used to identify regions encoding proteins based on the genome sequence data. In one strategy employing ORF prediction program, Gene Hacker program (Yada, RIKEN) was used. In the other strategy employing a method to predict ORF from sequence homology, NCBI BLAST program was used. The results from the two strategies were compared and the nucleotide sequence represented by SEQ ID NO:1 was finally determined. Further, 572 regions for encoding proteins (CDS) in the sequence represented by SEQ ID NO:1 were identified (Table 1).

[0082] (4) Identification of plasmids

[0083] The nucleotide sequences of two plasmids were determined in the same manner as for determining the nucleotide sequence of the genomic DNA. The two plasmids were leucine and tryptophan plasmids. The isolated nucleotide sequence of the leucine plasmid is as shown in SEQ ID NO:2; that of the tryptophan plasmid in SEQ ID NO:3. These plasmids can autonomously replicate within Buchnera and the amount of amplification is several times greater than that of chromosomal genome. Furthermore, these plasmids contain genes involved in the metabolism of essential amino acids (Table 2). Hence, the plasmids of this invention is useful in gene therapy designed to supply amino acids by introducing the plasmids into patients suffered from amino acid metabolic disorder due to failure of function or hypofunction of such a gene.

[0084] Number of regions for encoding proteins and number of RNA of the genomic DNA and plasmids above are as follows.

| | Regions for | | |
|---|---|---|---|
| | encoding protein | RNA | Total |
| Chromosome | 572 | 36 | 608 |
| Plasmid | 11 | 0 | 11 |

### Example 2

### Excessive Expression and Purification of DnaK Protein

[0085] A gene dnaK encoding DnaK protein (see BU153 in Table 1) was amplified by PCR, treated with restriction enzymes EcoRI and SalI for 2 hours at 37° C., and then integrated into EcoRI/SalI sites of pUC18 vector. PCR was performed using reaction solution having the following composition for 30 cycles, each cycle consisting of denaturation for 5 minutes at 96° C., annealing for 1 minute at 50° C., and extension for 4 minutes at 72° C. Primers used herein are as follows.

| | | |
|---|---|---|
| Primer F: | 5′- ATCGAATTCTAAATAGGAGAAACTTTAATGGGTA-3′ | (SEQ ID NO:6) |
| Primer R: | 5′- CTAGTCGACGTTCAATGATTCG-3′ | (SEQ ID NO:7) |

[0086]

| | | |
|---|---|---|
| Genomic DNA | 0.625 | μl |
| | (300 | ng) |
| 10 x buffer | 2.5 | μl |
| 2.5 mM dNTP | 2.5 | μl |
| Primer F (100 pmol) | 0.5 | μl |
| Primer R (100 pmol) | 0.5 | μl |
| Takara ExTaq | 0.125 | μl |
| Total | 25 | μl |

[0087] The resulting product was transformed into Escherichia coli by electroporation, and allowed to express excessively in E. coli. E.coli was disrupted by lisozyme and ultrasonication. Soluble proteins were collected by gelatin affinity chromatography, thereby obtaining DnaK protein. Since DnaK of the host E.coli was also contained at this stage, native-PAGE-applied disc preparative electrophoresis was performed (Nihon Eido). This electrophoresis notices that DnaK protein of E.coli and of Buchnera are similar in the primary structure, but significantly differ in the isoelectric point (Buchnera has a higher isoelectric point than that of E.coli). It can also be applied for purification of other proteins in addition to DnaK.

[0088] Therefore, DnaK protein of interest was isolated and purified by separating from that derived from E.coli (FIG. 1, a band pointed by an arrow in lane 1).

[0089] In FIG. 1, each lane is as follows.

[0090] Lane 1: Purified Buchnera DnaK

[0091] Lane 2: E.coli DnaK

[0092] Lane 3: Molecular weight marker

[0093] Lane 4: E.coli extract after excessive expression

[0094] (In FIG. 1, lane 1 is the protein of interest)

[0095] The present invention provides Buchnera genomic DNA. DNA of this invention is useful as genetic information to develop agricultural chemicals for destroying aphids and to analyze the metabolic mechanism of aphids. Moreover, DNA of this invention can be used as genetic information or raw materials for synthesis of useful substances.

[0096] All the publications, patents and patent applications cited in the present specification are incorporated herein by reference in their entireties.

What is claimed is:

1. An isolated gene derived from Buchnera sp., comprising DNA of the following (a) or (b);
(a) a DNA selected from a group consisting of a DNA having a nucleotide sequence ranging from a start point to an end point as shown in Table 1 in a nucleotide sequence represented by SEQ ID NO:1, or a DNA complementary thereto, and
(b) a DNA hybridizing to said DNA of (a) under stringent conditions and encoding a protein having a function same as that of the product expressed by said DNA.

2. A recombinant vector containing the genes of claim 1.

3. A transformant containing the vector of claim 2.

4. An isolated genome DNA of Buchnera sp., having a nucleotide sequence represented by SEQ ID NO:1.

5. An isolated plasmid derived from Buchnera sp., comprising DNA of the following (c) or (d);
(c) a DNA having a nucleotide sequence represented by SEQ ID NO:2 or 3, and
(d) a plasmid, capable of hybridizing to the DNA having a nucleotide sequence represented by SEQ ID NO:2 or 3 under stringent conditions, and self-replicating.

6. A method of producing said protein, comprising the steps of culturing the transformant of claim 3 and collecting the protein expressed by a target gene from the resulting culture product.

7. The method of claim 6, wherein the protein is a DnaK protein.

The application's sequence listing, which the Patent Office published only in electronic form, follows.

SEQUENCE LISTING (7 sequences)

SEQ ID NO: 1 - DNA, 640681 bp, Buchnera sp.
ttatccacagatttgttctttactaataataatagtaattattattttttattttttttatttttttgaatttaaaccttaaagaaaagaaaaagatcttttttttaagatattatgtttttaagattaacatgtgttatcttgaataaaatattaatactatttgaatatttttaaatttttaaaaggtttttatatgtttaatttaagaaattttgatgtaatcgttgttggagcaggacatgctggtactgaagcagctatggcttcatcaagaatgggttgtaaaacattattgctcactcaaaaaatttcagatttaggtgctttatcatgtaatccagctattggagggataggaaaaagtcatttagtaaaagaaatagatgcattaggtggtatgatggctaaagctattgattactctggtattcagtttagaattctgaattctagcaaaggtcctgctgtaagatctactagagctcaagccgataaaatcctgtatcatgagacagtaaaaaaaatattaaaaaagcaaaataatttgttaattttagaagcagaagttaaggatttaatttttaaaaattactctgttgttggtgtgttaacacaaaatgaaattaatttctactctcgttcagttgtgttagcagcaggcacttttttaggaggtaaaatacatatagggttaaaaagttattctgctggtagaataggagataagtctgctatagatttatctgttcgtttaagagaattgtctttgcgagttaatagattaaaaacaggaacgccgcctcgaattgatatcaacactgttaattttaacaatttattaattcaaaatagcgatactcctgttccagttttttcatttatgggaaacgtttcacatcatcctaaacagataccatgttacctcacacatactaatgaaaaaacacatgaaataatacgtaaaaatttagataaaagtccaatatatacgggttttttaaaaggtttaggacctcgatactgtccttctattgaagataaaattgtacgttttccagatagaaaatcacatcaagtatttttagaacctgaaggattatctagtattaaagtatatcctaatggtatttcgaccagtcttccaatagaagttcaagaacaaatagtagcgtctataaaaggtttagaaaaatccaaaattatcagacctggatatgccattgaatatgatttttttgatccaaaagacttaaatttaactttagaaagcaaattaattaaagggttattttttgccgggcaaattaacggaactactggttatgaagaagcggcttcacaaggattgttggcaggattaaatgcagcattaagttcaaagaatactgaaggatggtttcctagacgtgatcaagcatatttgggtgttttaatagatgatttaactactcaaggcacagaggaaccataccgcatgtttacttcacgtgccgaatatcgactttctttaagagaagataatgcagatttacgtttaactgaaattggtcgtaaacttggtttagtaaatgattcaagatggattcgttataatcaaaaagtattgaatattcaaacagaaatgaatcgtttaaaaaaaaataaaataagtcctatatcaccagatgctgatattttaaaaaaattatataatattaatttaattaaagaaataagtatgtctgaattattaaaacgaccgcaaattagatatcaagacttacaatctctagaatcttttagaacaggaattgttgatttggaagcgataggacagatagaaaatgagattaaatatgcaggttatattaaacgacaatcagaagagatcgagcgacatttaaaaaatgaaaatactttcttatcatctatttatgattataacaaaataagaggtttatcttctgaggttgttaaaaaattaaatgattacaaacccatttctattggtcaagcatcacgtatttctggaattacaccagctgctatatcaattttattaattcatctaaaaaaagaatcttataaacatactttgtagattacaaaatgattaattttttagttttcaaatcattttttataatttttaaaaattaaaatttgattttaatgtatttaaaatacataataattgtttaaatttgattttattgctaaatggtaactgtttgctgaatgtattttttttgttgtataatcttttttaaaattataaaaatatgagagaaacatatgattttagaaaagatatctgatcctcaaaaatatattagtcatcatttaagtcacttgcagatagatttgcgttcttttaaaattattcaaccaggtgcattgtcttctgattattggactgtaaatgttgattcaatgtttttttctcttgtactgggtagtttttttttaagtattttttatatggtaggaaaaaaaattactcaaggtataccaggtaaattacaaactgcaattgagttaatttttgaatttgtaaatttaaatgtaaaaagcatgtatcaaggtaaaaatgctcttattgcacctttatcattaacagtatttatttgggtttttttaatgaatctaatggatttagttccgattgatttctttccatttatttctgaaaaagtgtttgaattacctgctatgcgaattgtaccttctgctgatattaatattacactatcaatgtcacttggcgtgttttttttaattttattttatactgttaaaattaaaggatatgtaggctttttaaaagaacttattttacaacctttcaaccatcctgtattttctatttttaattttatattagaatttgtgtcattggtctcgaaacccatttctttgggattgcgattatttggaaacatgtacgcaggtgaaatgatttttattttaattgcaggtttgctgccatggtggacacaatgttttttaaacgtaccgtgggctatttttcatattttaataatttcactacaggcttttatttttatggtattaactattgtatatttatcaatggcctctcaatctcataaagattaaaatctattgtgatttttttaaaaactggagtttctaatggaaaatttaaatgttgacatgctttatatagcagtagctataatggtgggattagcatcaattggagctgcaatcggaattggaattctgggcggtaagtttttagagggagccgctaggcaacctgatttagttccattattaagaacacagttttttgttgtcatgggattagttgatgcgattccaatgattgctgtaggtttaggattatatatgctttttgctatttcataatttttttactataattttttataaaaaacatattattttagattattacataaaatctttacgtttttttagataacgtaaagattaattttcatattgatataaaaggtggattctcgtgaatcttaatgcgacaattcttggacaagctatttcatttgttttatttgtctggttttgtatgaaatatatttggcctcctattattttagctattgaaactagacagaaagagattaaagaatcattaactaatgcaaaaaaagctcgggatgaattatatattctcgaaaaaaaaatacatcaaaatattattgatgccaaacaaaaagcatcgaatattttaaattcagcaaataaacaaaaagtgtcaattttagaagatgcaagaaatcaggcgttagaagaaagtaaaaaaattatcctgaatactcaatcagaaattaatattgctattacacatgcacgtaaaaatttacataaagaagtagtagatttatctatttctatggcagaaaaaattatcaaaaaaaatatttctaaagatgataatcaagagttgttagatgaattagttacttctttatcacaggtgaaaaattaatgtcagtagcagatactattgctagaccttatgctcaagcaatttttgaaattgccattgagaataatacaattgaaaaatggaaaaatatattaatttttattaaaactattgcttcgcataaaaaatttaaaaattttttgtcaggttctatttcacctaaatatttatcgttaatatttatcacaattggcactaatataattgatgaaaacgcaaaaaatttaataaaattattatctgaaaatcaacgttttaatatattaaataatatattcgaacgatttgtaaaattagaagcatgttataaaaacatcataatagttcaattgaaatcagcattttctttaaaagaaaatctcattaacaaaatacgaaaagtattagaacggttcttcttaaaaaaaactaaaattatatataaagtagatcctaatatacttaatggtatgattgtaaaggtgaataatactatttttgatttatctgctcaaaatcatcttaaacaattatctgattctttaaatttttaagagaataaaaatatatgagattaaattctacagaaatcagtaaattaattaaagaaagaatagcgcaatttgaagtttttaatcaatcatacaatgaaggctctattatttctgtaagtgatggtattataaaaatcaatggtctttctaacgtaatgttaggtgaaatgattttattgcctaataacgagtatgcaattgctttaaatatagaaagggatacagttggtgctgtagttatgggtccctatattcatatttctgaaggagctaaagtacggtgtacagggaaaatactggaagtgccagtaggtgataattttttaggtcgagtagtaaatgcattaggttttcctattgatggaaaggattccatacaaaatgatggtttttttccagtagaagctgatgctcctggagtaattgaccgaaaatcagtcaaccagcctatacaaacaggttataaagttatcgattcaatgattcctatcggacgaggtcaacgtgaattaattattggtgatagacaaacaggaaaaactgcactagcaatagatacaattattaatcagaaacaatctggtattaaatgtatttatgtcgctattggacagaaactttccacaattattaatgttgttaaaaaattagaagaaaacaacgctttatttaatacaatcatagtagtagcttctgcttcagaagccgcatccttacaatatttagcaccatattctggttgtgctatggcagaattttttcgaaataaaggagaagattctttaattatttatgatgatctttcaaaacatgcagtagcttatcgtcaaatttctttattattgcgcagaccaccaggaagagaagcatttcctggagatatattttatctacattctcgtttattagaaagagcctctcgagtctctatggagtatgtacagaaaataaccaaaaataaaattactggaaaaacaggatccattacagctttgcctattattgaaacacaatctggagatgtttctgcttttgttcctactaatgttatttctattaccgatggtcaaatttttttagaatcaaatttatttaattcgggcattcgacctgctgtaaatcccggtatatctgtttctcgtgtaggaagtgccgcacaaactacgattattaaaaaactctcgtctgggattcgtacggcattagcacagtatcaagaacttgctgcattttcacaattttcatctgatttggatgataccactagaaagcaattaaatcatggtcaaaaaattacagaattattaaaacaaaaacaatattcacctatttctatagccgaacaggctcttatactttttgttgcagaaaataattttcttgatgatatttctatagataaaatcactaaatttgaaaaagaaatattaatttatgctcataattattattttgatttaatggaagaaattaataaaacaggcgattttaatattgttataaaagataaatttattaaattaattaccgagtttaaaaaaaatcaattttaaaaaaataactaataagttaaaaagagaaaatagtgaccagcacaaaagaaataaaaaacaaaatcgtgagtgttaccaatactaaaaaaatcactaaagcgatggaaatggtggcagtgtctaaaatgagaaaaactgaagaaagaatgcgatcaggtcgaccatattctgatattattagaaaagttattgatcatgtgacacaaggaaatttagaatataaacatagttacttggaagaaagaaaaactaaccgtattggcatgattataatatctactgatagaggattatgtggtggtttaaatactaatctttttaaacaagtattatttaaaatccagaattttgctaaagtaaatattccgtgtgatttaatattatttggtttaaaaagtttatctgtattcaaactttgtggaagtaatattcttgcgaaagcaactaacttaggagaaaatcccaaattagaggaattaattaattctgttggaattatactccaagaatatcaatgtaaacgaattgataagatttttattgcttataacaaatttcataataaaatgtcgcaatatcctacaattacacaattattacctttttctaaaaaaaatgatcaagatgcaagcaataataattgggattatttgtatgaaccagaatctaaactgattttagacactttgtttaatcgatatatagaatctcaagtctatcaaagcattttagaaaatatagcaagtgaacacgctgctcgtatgattgcaatgaaaacagcgacggataatagtggaaatcggattaaagaattacagttagtctacaataaagttcgtcaggctaatattactcaagaattaaacgaaattgtttcaggtgcatcagcggtttcaattgattaaaaattagtagaggttttaaaataatggctactggaaaaatcatccaaattattggtgctgtcgtcgatgtagaatttaatcaagattcggtacctaaaatatataatgccttagaagtcaaaaacaagcaatataaactgattttagaagtgcaacaacagttaggttcaggtgtcgtacgaacgattgctatgggttcatctaatggtttaaaacgaggtttaattgttactgatcttggacattatatcaaagttccggtaggagaagcaacactgggtcgtataatcaatgtattaggtgaaacaatagataataaaggggcattaaaaaataatcaatctgataaaattgaatattgggaaattcatcgttcacctccaagttacagagaccaggctagttgtagagaaatattagaaacaggaataaaagttattgatttaatttgtcctttctcaaaaggtggtaaagttggtttgtttggtggagccggtgtaggtaaaacagttaatatgatggaattaattcgtaatattgctgtcgaacactctggttattcagtttttactggagtaggcgaaagaactcgagaagggaatgatttttatcatgaaatgaatgattctcaagttttagataaagtttctcttgtatacggacaaatgaatgaaccaccaggaaatagattacgagttgcttttacaggtttaactattgcagaaaaatttcgtgatgaaggaaaagatgttttattatttattgataatatatatcgttacaccttagcaggtactgaggtttctgctttacttggacggatgccgtcagcagtaggttatcaacctactttagcagaagaaatgggtttactccaagaaagaattacttcaacaaaaaatggttcaatcacttctgttcaagcagtatatgtacctgctgatgatttaacagatccttcacctgcaacaacatttgcacatttagattctacagttacattaagtcggcaaatcgcgtctctaggaatttatcctgctattgatcctttaaattcaaccagtcgtcaattagatccttatattgtaggtgacgagcattatgaaaccgcattaggagtgcagtccatattacaaagatatcaagaattaaaagatattattgccattctaggtatggatgaattagcagaaaaagataaattattagtatctcgagcacgtaaaatacagcgatttttatctcaaccattttttgttgcagaagtttttactggttttccaggaaaatacgtttctttaaaagacaatattcgtgcttttaaaggtattatcaaaggcgaatttgatgatttaccagaacaagcattttatatggtaggttctattgaagaagttatagaaaaagcaaaaaaattataatttttttggatgtacaggatatatttatgaatttttatttagatgtagttagtttaacaaagactatattttctggatttgtagaaaaaattcgagtttctggaagtgaaggagaactcggtatttatccaggacatgctcagttgttaagtatacttaaaccgggaatggtatacatttttcataagaaagataaaaaagaagaatgtatttatatatcaggaggaatattagaagtgcaaccttctgttgtatctattttagctgatgttgctattcatgctattgatttagatcgaagtcgtattttaaaaacaaaaaaaaatgcggaagaatctattaaaagtaacaatacaaaaattaataaagatgctattttattgcaaatttctaaagaaattgcaaaattaagagtgcttgaagtaatggataaatttaaatgaaaaataatctttcgcggctggttttttcctgccgcaagtactaaaaaatttattctaagaataaaaaatatttttaaacgtcaatattttctgcttttaaagcattattttctataaattgtcttctaggttcaaccgcttctcccattagagtattaaataaattatttgcagaaactgcatctttgatagttacctgtagcatgtttctggtttcaggattcattgtcgtattccataattgttctggattcatttcacctaatcctttatatcgttgtataaacaagccgcgtttagattgttttattaaccatttccatgtattttttatactatctattttataagtagacccagatttttctatcaaaactttatctgaaaaatattttttaaaactttcacctaaattagtaattaataaatattctttgctttttaaaaattcttctttaaaatcatattttgtataatgtgcatatctagatatttttatagttggttcgaatatatttttatctaaattttctttaatttctattgaatagtgattattactgttatcttttttatttagattttcagccaatgtgtatatccattcttttactatttcgatatcttttaaattgtgtaaatgattgtggtagattaattcattaaatactaattttggaaaatagtgtttgctttgtttcataattatttgaatataatgatattcagacataatttttttaaattttttaagtttttgattaataataagattatcttcactttttaaaacaagatcttttaaagcatttttaatttgatatgtattcatttcttcatcatttttaatatatttttcttttcttcctttttttaatttgtataatggaggttgtgcaatataaacataccctttttcaattaactcaggtagttggcgataaaaaaaagttaagagaagtgtacgaatatgcgcaccatctacatcagcatcagtcattataataatataatgatatcttaatttatctatattatattcatttttaccaatcccgcatcctaacgcagtgataagagaggcaacttcttgtgataaaatcattttatcgaacttggatttttcaacattcaatatttttcctttaagaggaagaattgcttgattttttctgtttctgccttgtttagcagacccacctgccgaatcaccttctactaaataaatttctgagaatttaggatcattttcttggcaatcagataatttcccaggcagtgcacctaaatctaatatactcttttttttgttgatttctcttgctcgtcgcgctgcttctctaactttagccgcattgatgattttttgaataataaattttgagtcagacggattttctaaaagatattcaatcaggttttcattaattaatgattctattactgacctcgcttcagaagaaactaatttatctttggtttgcgatgaaaattttggatcaggtattttgattgatataatagctgttaatccttcacgtacatcttcacctattatagtagttttgttctttttattatagccttctctttctatatgtaaatttaatgttctcgtcataccggaacgaaatcctgctaagtgtgttccgccatctttttgtggtatattgttagtaaaacataatatattctcttgatgagaattattccactgcatagcaatttctagttctatttgatcttttgtagatcgaaaataaaatatatgtgtatgaataggtgtcttttttgcatttaaaaatttaataaatgctttaatgccacctttataatgatagcaatttttaatgctagttctattatcttcgagataaatagcaatgtttgaattaagaaaagagagttcacgcaaacgtttagataaaatttcatattgaaattttatattatttgtaaaagttttataactaggccaaaatcttatatacgtaccagttgtgtcagttgttccaatgatagaaagaggattttctggttttccatgtctgtatatttgttgatattttttcttatttttgtctattattagttctaatttttccgataaagcgttgacgactgatattcctacaccgtgcaatccacctgatatttgatatgaagcattatcaaatttgccgcctgaatgtaatactgtcagaataacttctgccgctgaaatgttttcttcaggatgaatatctgtaggtattcctctaccatcgtcttttactgaaactgaattgtctgaatgaatggttactattatttctttgcaataaccagacagcgcttcatctattgagttatctactatttcaaaaaccatatgatgcaatccactaccatcatctgtatctccaatatacatacccggtcttttacgaacagcatctaatcctcttaaaattttaatattagaagagtcgtatatatttttcataactttccctataatttttttaagtaaaataattattaaaattattatattatttttatgtaaaaaaataatattgaaattattttacattatttattatattctataatgcaggttcgaaaatatttaacgttttaataacattacaacatacaatattgatgcatcattttctgcttcaatttgtattgaattattagcattatttaaaaataaaaaaatattttcgctagtaatagaatttaatatttctattatgtagtacacattaattgatatttttactgtatttccagtataatttatattaaatctatcttctgctatttcttcttcttgattatcagataatactttaaattgaccatttctgatatgaatttctactccacaaaatttttcatgggataaaatagcagctcgtaacaatgattgctttaatagttttgaatttaaagtaataaaattgtttttattttcaagcaaaacactcttataatcaggatattgtccttcaattaattgtgttgtaaatataagatcttctatatgtactctaatattattttttccaactaaaacttttattggttgttttggaatatttaataatctatatagttcaataacgccttttcttggaataactattgaaaaaggaattatattttcttttaaaaaaaattttgatattcctagacgatatccatctgtggctactgcataaagtgatcgatctgttttttctaataaaataccattaaggtagtatcgtacatcttgtttagccatagaaaattgaattttttctatcattttttttaaaatatctgaaggtataaaaaattctgaaatatgatgaaagtcatgatgaactggaaaactatcataaggtaaggtggttaatatataacgactatttccagaaataatatgcattttattattgtttaattgcatctctatatttgatgaatttaatgaatttctgcaaatatctaaaagttttcggcctgaaatcgttgcagttcctgatatgtgttctgttgatagttgaatcatagcaactaattctatttctaaattcgtccctgttaatgataacattccgttttttatatttattaatacattatctaaaataggaagagaagtattttttacaagcaaccgacttattttttgtaaatttttaattaaaatattattattgataataaatttcatatgatcactttgatagagttctaattaaatttaaaaaatcttttttaatatcgtgattttcttttcgcaattgttcgattttacaacatgcatgcagtactgttgtatgatctctgccactaaaagcttctcctatttcaggcaaactatgattagttaattttttcgccatagccattgccatttgtcttggacgagctattgaacgtgaacgtttttttgataatagatcagaaactttaattttatagtattttgctactgttttttggatattatcaatagtgataattttttcttgtacagcaagtatatcttgaagtgcttcacgagcaaaatctacagtaatagcacgatgggtaaaacgagaattaagaataactcgatttaaagcaccttctaattcgcgtacattagatcgtaaatgtttagcaataaaaaaagccacttcattagataatatgacgttattttgatcagctttttttataagaatagcaactctagtttcaatttctggaggatcgatagcaattgtgagaccccagctaaatcttgattttagacgatcttcaactccgtttatttctttaggataacggtcagaagttaatatgatttgttgatttccttctattaaagtattaaatgtatgaaaaaattcttcttgtgaacgttctttatgtgcaaaaaattgaatatcatcgattaatagtgcatcaacagaacgataatacaatttaaatttttcaatagcattattttttaatgcttttaccatgtcttgtacaaaacattcagaattcataaaaatgattttaatatcatacttatatgataaaatttcatttcctatagcatgaagtaagtgagtttttcctaatcctgttgcaccatataagaataatggattataagaatttccaggatttcttgcggcttgaaatgctgctgaacgtgcaagctgattagattttccttctacaaagttttgaaaattatatcttttattaatattagatcgataagacaaatttttgaattttggaatattggaccagattagcttttcatttttattattattattattttcaatgtttttttttaatttgttttctttataaatttgataaatttcaaattttattaatggagaattagtaccgcaataatcttgcagtattttttttaaatgatttaagtatttgtctttcacccattccaaaacaaatttatttggcgcatatatttctagaatgttattgtttagtttggccttcagagagcgtatccacatactaaactctgtattcggtagctcatcctgcaaccggtcaagacactgtttccaaagacaaagtgacacggtagactccaagcgaacacaatcaataaaaaaataaactttgaaaagttattgtttttcatacgtttactttgatatatataattttatataattttttttatatgaaattatgttttttatattaaaagttatacaatctaagattggcgagtataacgaaaaggatataatatattgttaagatattttttatctcaagaagtgatttttaaatgtactgtcatttttataaaaaaacataattatcataccagaatacaaaattaaaaatatttttttagatcagttgatatcgaatgtattttaattgataaaaatttttataatattttttataatcaatgatttaaataaagttaattgactatagcatttagaataattaatcttattaaacgtgaattttataaattatattcaacaaaaaatagtaaggtaaatattaaaatgaaacgaacttttcaaccatcaatattaaaacgtaatcgttcacatggatttagaattcgtatggcaacaaaaaatggtcgttatattttatcacgaagacgtgctaagttaagaacacgtttaactgtttctagcaaatagtaggttaatattttgttgaattatttttttaaaaaacaattacgattatctgactctacaagttttcaagatgttttcaatggatctgtaaaaaaaaaaaatactttagaaataagtattttaggacgttttaatttattaggacatcctagattaggtcttagcatacctcgaaaaaacattaagcatgctcataatcgaaatttgattaaacgattagtgcgagagacttttcgtttattacaatacaaattactttcaatggactttgtagtgatagcaaaaaaaaatattctctttttaaataatacaagaataatagatatgctaaatagtttgtggtctaattattatagataataatattttttattctatatattataaatacattatctattttaaatatgattaaaataattttatgtcaattgaagtagtaccctttaaatatagttatttaactgtgaatattagagataaaagtgaatattaattatggaagtacaacgtaatttttttatttttgcttttttatttgtttcttttctactttggcaggcatggcaaagtcaaatgtttttaaataaaaaaacaaatgaaaaaatagatccaatttttcattttattgatgtaaaaaaaaataaaaagaaaatttttatcaaaaatgatgtaattagtttagttgttaatatgtatggtggtgatgtagaagaggcatctttactcgcatacaaggatacattatattcatctagaccttttaaattacttgaaactggatcggattttatttatcaggcacaaagcggattaattggaaaagatggacctgatagttcaataaatgatagtagaccattatattctgctaataaaaatttttttgtattaggacctaacgaaaaagaattgcgtgttcctatcaaatggttaagtaaaaatggtgtaatttataaaaaaacttttattcttaaaccaaatagatatgatgttcaaatagagtatgacgtctataatccaagcaaagaaagtttgaatatgaatatatttggacaaataaaacaaacaatcaatttacctaaaaaacgtaatgtttatagtggaaattttgctcttcaaacttttcgtggtgcagcttattcaagtgatgataataaatatgaaaaatataaatttgatatgatcgctaataataaaaacttgcatattatgactgaaagtggatggatagcaatgctacaacaatattttgctgttgcttggattcctgataatttaggtaaaaatacaatatatacatctagtttagatcatgacacagcggtaattggatataagtctcctataattaatattccacctaattctagatcgattataaaatcaaagttatggattggtccgaaaatacagaaagaaatgaaattagttgcgccaaatttagatttaacagttgattacggttggctttggtttttatctcaaccattatttaaattactaactattttatatagtattataggaaattggggtttttctattattttaattacttttattatgagagggttaacttatcctttaacaaaagcgcagtatatttccatggcaaaaatgcgtgcgttacaacctaaaatacaggaaataaaagaaaaattttcaaaagataaacaacgtattagtcaggaaatgattttgttatataaaaaagaaaaaataaaccccttaggtggatttttacctatttttattcaaatgccaatttttctatctctttattatatgcttataggatctgttgaattacgtcatgctccttttttattgtggattcatgatttatcgagtcaagatccttactatgtcctgcctgtgataatgggtttaacaatgttttttattcaaaagatatcttctactaatcatatttctgatccacttcaaaaaaagattatgaattttatgccggtgatttttactgcgttttttttatggtttccttcaggattagttttgtactatataattagtaatttagtcactattatacaacaaaagtttatcttatctaacttagaaaaaaatagataaaattgtttgatttttgatatatataaagaaaataatttatgatgcgtaatgaaactattgtcgcccaagttacctgtccaggaaaaagtgctgttggaatattgagaatatctggttttcagacaaagatagttgctataaaaattttaggtaaaattccactagctagatttgcgacttattcaaactttttagatgaaaataatgaaatattagataaaggaatatctttatggtttcctgctcctcattctttaacaggtgaagatgtactagaattacaaggccatggtagtccattaataatggatttactaataagaaggattttgtctattaataatattagaatggctaaaccaggggaattttctgaacgtgcttttttaaatggaaaaatggatttaattcaagcggaatctatagatgatttaattaattcagaaacagaattatccgctcgtgcttcattaaattcattacaaggaaaattttctttttttattaaagaactgatgaatttgattattgaatttcgtattaatatagaatcaaatatagacttttcagaagaagaaattaatattaatatgcaggatataattaatataaaatttcgagaactacatgataaatttttgaaattaaaggctacagttttaaaaggaagtctcttaagagaagggaaaaaaatcgtaattgctggacttcctaattccgggaagtctagcttattaaatattttatcatattctgatagagctatagtaactgatatacctggtactacacgagatcttctatatgaagatatcagtattaatggtgttagatgtgaattaattgatacagcaggtctgcgtgatacagatgataaagttgaacgtattggtatcatgcgtgcttgggaaatgattagaaaatctgatcatgttctttttgtaattgataagacacttagtaaatcaaaacaaaaaaaaatatgtgatgattttatgaaaaatattttaaacaataaaactcaagtaacatttgttttaaataaaaacgatttaataaaagatgaatttggtattaaagaaatagatggaacggcatttattagtatatcagcacgtacaggtgagggtgttaatattttacgtgaacatataataaaaattgaaaaaaatataaataatgaaagtgttttcattgctcgtcgtcgtcatatcaaacaacttgatttagcgtacgatgagtttttaactgccgaaaatacatggagagagtctgagaatattgaattactagcagaatctttaagtattataagtaagtttttaggcgagataataggtcagtgtacttctgaagacttattaaatcatattttctcaagtttttgtattggaaaataaattttaaaagaacaaaatttgcccggaggcggaattgaaccaccgacacggggattttcagtcccctgctctaccaactgagctatccgggctttttttatattaaatcatcaaatgtaaaatgttgtcaatgttttttattgtaaaaattttttatatttatattttattgtttttttaaaaaaaattacttttttaaaatattttaaaatataaactttcttaaataaaaaaataaaaaaataatttttacccttgaaagttttaataaatatccctatatttaaaataagagaaaaatattaaattaataaaaaataattttttaaaataatctagaaagattatttacaggagcattatcatatgaaaattcgtccattgcatgatcgtgtgcttgttaagcgtcaagaagtcgaatcaaaatctgcaggtggtattgtattaacaggatctgctgcagggaaatcgactcgaggaacagtgacagctgttggaaaaggtcgtgttttagataatggagacattaaaccattagatgtaaaagttggtgatgttgttatttttaatgaaggttatggtgcaaaaacagaaaaaattgataacgaagaattattaattctaactgaaagcgacattttagcaattgttgaatagtaaaccacatgctatatccattgaaaaattgatttaaggggatgtcaaatggccgctaaagatgtaaaatttggaaatgaagcccgcattaaaatgcttcgtggagttaatgtattagcagatgcagtaaaagtgactttaggaccaaaaggtagaaatgtagttctagataaatcttttggagcacctagtattactaaagatggtgtatccgtagcccgtgaaattgaattagaagataaattcgaaaacatgggagctcaaatggtaaaagaagttgcatcaaaagcaaacgatgcagcaggtgatggtaccacaacagcaacattattagcacaatctatagtaaatgaaggtttaaaagcagtagcagctggtatgaatccaatggatctgaaacgtggaattgataaagctgttatcagtgctgtagaagaattaaaacatttatctgtaccatgttctgattctaaagcaattacacaagttggtactatttctgcaaatgcagatgaaaaagttggttctttaattgcagaagcaatggaaaaagttggtaatgacggagttattacagtagaagaaggtacaggtttacaggatgaacttgaagttgtcaaagggatgcaatttgatcgtggttatctatctccatattttatcaataaaccagaaacaggtattgttgaattagaaaacccatatattttaatggctgataaaaaaatatctaatgttcgtgaaatgttaccaatattagaatctgttgcaaaatcaggaaaaccactattaattatttctgaagatttagagggtgaagctttagcaactttagtagttaattcaatgagaggaattgtaaaagtcgcagcagtaaaagcacctggatttggtgatcgtcgtaaagcaatgttacaagatatttcaattcttactggtggttctgttatctctgaagaattagctatggaattagaaaaatctactttagaagatttaggacaagcaaaacgtgttgttattagcaaagacactacaactattattggtggtgtaggagaaaaacactccattcaaagtcgtattagtcaaatccgacaagaaattcaagaagctacttctgattatgataaagaaaaattaaatgaacgcttagctaaactatcaggcggtgttgcagtactaaaagtaggtgcggctacagaagtagaaatgaaagaaaaaaaagctcgtgttgaagatgcattacatgctactcgtgcagctgtagaagaaggtgtagttgctggaggtggtgttgcattagtgcgtgtagcagggaaaatagctgatttacgtggtcaaaatgaagatcagaacgtaggtattcgagttgctttgcgtgcaatggaagctccattacgtcaaattgtttctaattctggtgaagaaccttctgtagttacaaacaatgtaaaagacggaaaaggtaactatggttacaatgcagctactgatgaatatggtgacatgatagattttggtatattagatccaactaaagttacacgttctgctttacagtatgctgcttctgtcgctggtctaatgatcacaacagaatgtatggtaactgacttgcctaaagaagataaatcttctgattctagttcttctccagcaggaggaatgggtggcatgggtggaatgatgtaataaaaagtttattttattacaattttttgaaacaattttaaaaatacctttcctcagaatcactattctgaggaaattttttatgttctttgaatatagaaattattttacttttgaaataaatgattagaatcttgttctaataacgtttaaaaataatcagcactattttctaatattgaatatataaaaatatttttatgtaaaaaaaaatctctaaatttttttgaatcagtattattaaatactttaatagtaaaattacaatcaataaaacaatagtaccttttttaatttataaaaataactcatcaaatagtattttatttttttgatactaaacatcatttaaggtgataattttagaaggagctaaatacatattaaagatttatatatagaggtgctataacgatcatctattttaaattttttatatttttttataaaacttggattcaaaatgtaattgtaggtattttatatgcttatataatgatttttttaaaaattatatttagcatttaaaatattattttcttatatagaagactatactttactttatttgtgtattatatttttatgttagaatatattttacttagcaacataaattaataatgttatataatcagaaatcttttcatataaatagaggttgtatgagaatatatcatagtaataattttcgttcaggtcgtaaaattattttcgaaaacgagccgtgtttgatagaatctagtgaatttgtaaaacctggaaaaggtcaatcttttgttcgtgtaaaattgagaaaattattaacaaaacaacttatagagaaaacatttaaatctacagattctttagaaatcgctgatattatagaatatacactttcttatttatataatgacggtcgtttttggtattttataaataataatacttttgaggagttatcagtagatgaaaaaattattggagtacataaaaaatggttattagaacaagatacatgtattgtaactttatggaataatcaacctatctcaattacacctaataattttgtcaatctaaaagtcatacatgttcaagcaactctaaaaggcgatactattaatactagtagtactaaattagctacattaagtacaggtgctattgtaagagtcccgttgtttattcaagttggttcattaattaaagtagatacaagatcgggtgaatatgtatcgcgaataaaatagaaaaatttttttatatattagtattcatttcccttaacatattgtctgtaactatcccattcaaaagttaaccataaactatttcctaaacgcattctatcaatgactctttcacctaataaacttttcattcctttatgatctaaattagacaacattccagtagaacgttttgaagatgatcttctatcaactatttgattaataattactttttcgtaacgagattcagtttgcataccaatttcatcaatcattaacaaatcgacgctgcttagatcatgtaataaattttcttcagtgatattactagtcccactaaacgttcctttcatattagacattaaatcagctactgttacaagtaaaatgctctttccatgtaaaattaagtaatttcctatagcagatgccaaatgattttttcctgttccgggtttacctgaaaaaataaaactagcaatattttcattaaattcttctgcatagcgtttcgatgcttttagtacttttctttgaccatcatgttcgattttataattgtcaaatgaacagttcatatataattctcgaatacctgatctgcctagtacacgttgcattttcattgctttattttcacgtattatagattcagatgacaatcttccttgttcttgattccaagctaataagtcttcatcattatcaaatttaggtttaatatttttaggcataagacgttgaagacgtttaaaaaattcagtataaaatgtcattatttacctctaaatccatttggtacagtttgatcgggtgttggaatatatgtaatgtctcgttttttttgtgacatgtaactaattgatctgcttttttgtagacttcgagctaatttttgctgccattgtatatgatgaaaaaaacaaccttctgcttgccaataagaaataaaagatgccagttcagattctaatatttcttcagtcaacgtaatcccccataatgcagcttgacgaatgaaatctttatctggagtccattgtggatgcatagaaaatttttttgagatttgttgttttgttttatctagatctaacagattacattcaagatcaaatattttttttaatatataaggtgtaattacataaaaaataggggatttattttttaatactcctataattcctttgtttgatttttctaaaatttttatgggatttttacaaaataattcaagagatatattatcggaaattaaaatcttcataagtatttcactgtatttaattttttaaaatgtttacgtatattgtatattatcggactttttaaaacaaaatattattattcttattgattgatcttatgtactgcaaatatatagatagcattgtatttgatttgtaattttttttttatatagagtccaattttttggtacaattatggattgttttttttcttgttctatataaataaaagaattttttttaatccattttttattttctagtaaattaatagtttttttaactaatccttgatgataaggaggatcaataaaaattatatcatatggtttgtttctagttttttttaaccaatgcagcgtattagtacgtataatttctacattgtatatgtttaactcttttatattttttttaagagtaagaaatgtttttttttctatttctaataaagttgaaaaggctgcataacgagatatagcttctatccctaatacaccactacctgcaaaacaatcaagacatcgagagtttttaatgtatttagataaccattcaaatagtgtttctcttatttgattagtagtaggacgtaagtttggaatgtttttaaaagatatctttcttcccttaagatttccagaaataatgtaaattttactattttttctaaaaaaagaattgttcattttattaaattatttatgttagtgatataatttatctaaatattaacaacgacttaaaaatattttattttttaatattagatattttgagaaaaatagttttgacttataaagtaaaaggcaaaataacatgaaagatagtaaaaaaaatggttttttttcttggttaagttctaaaataaaaaaaaagaaaacaatagatattagacaaaataatacagataaaaatcatgatattaatcatgaagacttatataccaagaaagatcttttaattaaacaagataatcctaaaaaagatgaaatagatacacttaatgatcatggtaaagatatagagaaggcacaaaacacaaaaaataatttttttttgcgtttgaaaaaaagtttaaaaacaacaaaaaagaatcttggtgataaaatttatcaaatttttttatcaaaaaaaatcgatgaagttctttttgaagaattagaagaaaaaatgttgttagctgatattggaattaataccactaatcgaattattagtaatttaattaaagatgtcaatcgtgaagatttaaaaaattctgaaaaattgtattttttattaaaaagaaaaatgtttaatattttaaaaaaagttgaaatacctttagaaatatctagtcatagtccttttgtgattttagttgtaggagtcaatggtacaggaaaaactacaacagttgctaaacttgcagaaaaatataaactagaagggaaatctatcatgttagctgctgcagatacatttagagctgcaggtatagaacaacttcaaacattaggaaaattaaacaatatacctgtaatagcacaacgttctggttcagatcctgcagcagtaatatttgatgctgtaaaatcagctaaatcaaaaaaaatagatgttttaattattgatacagcgggtagattgcataataaattgcatttaatagaagagttaaaaaaaatagttagagtaattaaaaaaatagatatatctgcaccacatgaaaaactgttaattattgattcatgtaatggacaaaatacaatacaacaaacagaaatattccataaagcattaaatttaactggaattataattacaaagttagatggaacggcaaaaggaggagttgttttttctttggctgatcaatttcaaattcctattcgttatattgggattggtgaaaaaatgcaagatttaggtcattttaatagtcaagaatttattgagtctatatttacatagaaaaggatattattttaaaaataaaaatgttctattttttataaaatatagtttaattattttttgtataaatctttgatttatatttttaattaaagtactataggtatatcccacatgtttataattcagtatatatgattcgttgatgcgggaattaaaatgattaataaagtacagattttatctgtaacaccaccaggtaatttagatgcttatatcagaatagctaatttatggccgatgctgtcaattgaagaagaaaaaaaattaaccaaacgattgcgttataatggcgatttagatgcggcaaaaactttaattttatctcacctccgttttgtaattcatatttcacgtaactattcaggatacggtttactgcaatctgatctcatacaagaaggcaatataggattaatgaaagcagtacgtagatttaatccagaaataggcgtacgtcttgtgtcttttgcagttcactggattaaatctgaaatacatgagtatgttttacgtaattggcgtatcgtgaaagttgctactactaaatctcaaagaaaactattttttaatttaagaaaaacaaaaaaaagattaggatggtttaatgaagaagaaattcaaatagtagctagagagttaggcgttagcagtagagatgtaagagaaatggaatctcgaatgtccgctcaagatgttgcttttaatccgtcacctgaagagcattgtgatagtaaaacaaatagctctatacaatatttacaagataaaacttctaattttgccaatggagtagaacaagataattgggaagaacatgctgcgaataaattaagtagcgcgttattaagattagatgaacgtagtcgtcatattattcatgcgcgttggttagataaaaataaaaaaaataccttgcagaatatcgcaaataattatggaatttctgcagaacgcgtacgacaattagaaaaaaatgcaatgaaaaaattaaaattagccatagaagcttaattaaaaatgacatttttaatacaaaaaaaattttttattaaaaattatttatatagagtatgagactaagtttaattcattcaaaaaactcatactctttttttttagattaatgaaaattttttatagattaataaattttattctactgttaccgatttagctaagtgtctcggttgatcaatatcccttcctttttttaatgcaacataataagcaaataattgtaggggaattgtataaaaaataggtgctattaattcttctacatacggaagctttatagtatttatattttcttcataatcaaattcttgattagaaaaaacataaactattcctcctctagaacatatttctttaatattttttttatttttctctaatagagaattttcaggagcaatcataataactggtatatttttatcgattaatgctagaggaccgtgtttgagttctccagatggataagcttcggcatgaatataagaaatttcttttaatttcaaagcaccttccattgcaattggatactgattacctcttccaagaaagagcatgttttttttattagctaatgtattagccatatcttgtattaattgttttttttttaaaatttcttcaattctaacaggtaaaatacttaatgtttgtacaattctttttgaggtattattgttttctttttttgaatttattattttagcaactaataaaagtaaaacagtcaattgagtcgtaaaagattttgtagaagccactcctatttctaatcccgctttagttagtatataaaaatcagattctcttactaaagatgaacttttcatattgcatatagttagatttcctaaatatccaagttttttagaatacctcaatgcagataacgtatcagcagtttctcctgattgtgacaaagtaattaataaactcttttttcttacaactagttttcttgaagaaaattcagatgcaatttctacatcacaaggaatatttgcaagttcttcaaaccagtatcgagaaaccatagcagcattataagaagtaccacatgcaactatttgtatatgttctgtattataaaatatattattttcttttgatcctaattcagaaaaatgtactttattactatttgttagacgattttttaaagtattacgaattgatttaggttgttcatgtatttctttttccatataataacggtactttcccttctttgctgatttgtattctatattagatactacttcttctcgttgaattatagaattatttttattaaagatgttaatttcttttcttgcgacaatggcaatatcgccttcttctaagtatataaaacgttttgttacatgcaataatgcaatttgatcagaagctataaaattttcttctgttcctaatcctataattaatggacttccagaacgtgctgctattaatttggaaggattattttgatctattactaccatactataattaccatctaatttttttatactattttgtataacttttatgagggaatctttttttttgttttgttcccaatgtaataaatgtgcaattacttctgtatcagtatctgaagaaaatatatatccttgtttttttaaaaatccacgcagtgtggaattgttttcaataattccattatgtacaacaataatattagaagaaatatgtggatgagtattctcttttgagactttcccgtgagtagcccatcgagtatgagcaactccaatactaccaagtattttttttttatttgttttttttataagttcgttgacctttccaacacaacgaattctaacaatattgtttttattatctattacagccaatcctgaagaatcatatcctcggtattctagttttttaataccatcgataagaaaattggcaatattacgttgtgttactgcagcaacaataccacacatattgatacctttcatttttttattaaaaaatttcattttaatataaatatattgatttaataagctatgttaattttttttaatgattttttttgaacgcatccagttttttttgtatttttgttctttagtgttataaactaaacatggtgtattgacgtcttttgttacagtagtacctgctgcaatagtagtattttttgcgatttttataggagcgatcagttgtgtattagaacctactaaaacattatcaccaataatagttttgaatttatttgctccatcataattacatgtaatactacctgctccaatgtttactttagaaccaatttcagaattaccaagataacttaagtgttttaccttagattcatttttaataaaagtatcttttgtttcaacaaaatttcctatatgaacatttctatctaataaagtatttgatcgcaaatgagcaaatggacctataatacagccttttcctattttagaattttctataattgtatatgcttgaatgttagtattactatcaatactactatttctaataatacatccaggaccgattttaacatcgtcacctaaaataacattattttctaaaatcacacctgtgtctatttcaacgttttgaccatgttgtaatgttcctctaaaaataaaatgagatggatcttttattgtaactccattgataagaagtttattaatttgttttttttgaaaaattttctctaaattagataattgcaacttattattaatccctaatatctcttcataatttaatggttctattgttttaataaaactaccttcaagatgagctaaagcgataatatctgttgcataaaactcttgtttttcattttttttatcaattttttttagccatcgtgttaaatctttactttgagctataaaaatacctgaatatatttctttaatatttttttgttcattggaagcatcttgatcttctattatactaataacttttcctttttttcgtaaaatacggccatatccattaggattttttacttttgcagttaataaactaatttttgattgttttttagatttttgtaatttttttattgatactggagaaataaatgggacatctccatatagaactagtatttctgtattatctgaaattttttttattgctagcagtatagcatgacctgttccttgtggttttttttgtattatccattgaattgggatgttataaatattagatagtacaggttttttttgatcactgtaaaccaatataatttttttaggttttatagattgagcagtttctattacatgttctaaaattgtttttcctcctaaaaaatgtagtactttaggatgattagatttcattctagttcctttaccagctgcaagtattacgataatgatttcttgtgttaacataaaaaccctttttttatatattttttactgaatagttttaattgattgtacattattttttttatatcgtaatttgttgattcgagaatataaaatttttaataaatactttttacatgcaaattaagatatataatatagtattcgtaataaaatatattatgtttttaaggttttttatgtatcgaattattgcagtggatttagatggcactttgcttacttcagaaaataaaataacaaaatatactaaagagattatacagatattaatacaaaaaaaattttattttgtctttgcttcaggtcgtcattatatagatattatgaagattaaggatagtttaaaaataaatatttttataatttcttctaatggttctaaaatttacaatttagataataatctaatatttagtgataatttagatgaaaatattgcatcaaaactatgtagaataaaatattcagacaaagaaattattactcaggtatatcaaaatgatcaatggtatataaataataataaagtagaaaataatttttgttctctactttcatcattgcaatataaatatttttatccagatgatttaaattttaaaaatatcagtaaaattttttttacaagtagaaattttcaaaaattacatattctcaaaagaaaaattattaatttttatggtaataaagttcatgttaatttttcaattccaggttgtcttgaaattgtatcagggaccacttaaaaggttatggattaaaattaatagctaatttactaggagtgtctttgaaaaattgtattgcttttggcgatggaatgaatgatcaggatatgttaaaagttgcgggtaaagcatatattatgaaaaattctgatccacatttaaaaatagcactgccgcatcttgaaatcattgaaagcaatgataatgatggtgtagcaagatgcttgaataaaatttttatagaaaataataaagagatgttataaagttataaaaatttcttatacaagaagttttttttgatttctgtagatggctatataattattgctatgtcctttttcttattagtttttctttcgattataaaccttgatttttttaattatttaatattcaaaaaaggtcatgtacaattctaattttttctgagacttgtttgtatttaaaagaaaaaatgtattatatatgattttaaacatagatgtaagattatatcttagaaaaagataatttaatatatctagtctgttttatcaaaaaatagattttgtcaatattgcatatatcaggtccgttgatcgagtgttgttttttaaaaaaaagagtagttaaaaaatacaactaagcgtacttcaaaattaaaaactagtatatataatcaattatttgagagtgcatacttcagaaattagtttaatatcaattttttcttgtcttagaaaccttcgaagattaaacatgatacccaaataaaaatatatttttattttaaaaggatttttgaagatttataatagtaatttaaactattgaatatatctgtatatttaatgaataattaaatgattatatataatgaaagtctatatattatttaatatattttagatagttgaaataacattttaccttgtattgtaaaaattatggaattactttttctgagaaataatttaaatcctgttttttctaattagttaaattgatatgatattactgattgtatttgatataattaaatagcatctgttttcaatacactgttatttttttaaggcttattatatttatagatattttattccaattataacattccttcatatcgagaactaactattaatgcttgctcattttctttaattgtaagaattacaaatatgtattttatgtaagtatttataaattattttcatgatcaaaaatataatttaaaaaaataggacatttaaaatgacaattttaaatcatactttaggatttccaagaataggattaaaccgagaattaaaaaaagctcaagaacaatattggtccggggaactgatgattaaagatttattattagttggttctgaattaaggaaaaaaaattggcaaaaacagaaagaatctggaattgattatattccagttggagattttgcttggtatgatcatgtattaaccacgagtatgatgttaggaaatatcccagaaagacataataatacagttgactctattgatttagattgtctattccgtattgctcgaggttgtcctccggatatttcagcttcagaaatgactaaatggtttaatactaactatcattatattgtacctgagttttataaaaacaaagttttaaagtactcttggaaacaaattttagatgaagtagatgaagctttattattagggcacaaggttaaacctatacttttaggaccgattacatatctttggttgggaaaagtaaaaggagaatattttgatcgtcttgatattttaaaagatataattctaatatataagcatgttttaaaagaattatctaaccgtagtattgattttgttcaaattgatgaacctgttttggttttagaattaccaaaaaaatggaaagacgcttatcattatgcttataaagaattatccggtataacaaaattattgcttacaacatattttgacagtattgagcataatatagaatttattcgtgatttacctgttcaaggtattcatatcgatctagtgcatggaaaatataatttaaaaaattttagttctaaaataccatcagaatggatgctgtctttaggtgttattaatggtcgaaacatttggcgttccgatcttttaaaatggtttaaatctatcaaatcgatttcaaatcatcatagaaaaatattaatcggttcatcttgttctttattacatacaccgattgatttagtagcagaaaaacacttggataaagaagtaaaaagatggttttcttttgctgtacaaaaatgtgaagaattaagattattatcaagtgctttaaatgataatgacattgattctattaaagaatggagtttacctatttatgagcgcagtgtttctaaaagagtaaataaaatcgaagtagaaaatcgcttatcaaatgttttaattgataaacatcaacgtttaagtccctataaaactcgctctatagaacaaaataaaaagtttaattttcctattttaccaacaactactattggatcttttcctcaaactatcagtataagaaaattacgaagagattttaaattagggttagtgactgaagaagaatacacaaaaatcattaaaaaaaatattaaaaaagttataaaaatacaagaagaattagatattgatgttttagtacatggtgaagctgaaagaaatgatatggtagaatattttggtgaacatttagatggatttgcatttacagataatggatgggtacagagttatggttcacgttgtgtaaaacctcctattattattggagatattagtcgtcctaaacccatgactatagaatggtctaaatatgctcaatctttaactaaaaaaccagttaaagggatgttaacaggaccggttacaattttactttggtcttttcctagagaagacgtttcattaaaaaaaattgcaacacaaattgctttagcattatatgatgaagttctagatttagaaaaagaaaaaatagaaataatccaaattgatgagccagcattacgagaagggttgcctctacgaaaaagttcttggcatgaatatttatcttgggcggttgatgtatttcgtttaagtgcttcaggtgttaaaaatactacacaaattcatacacatatgtgctattgtgaatttaatgatatcatggattctattgcattattagatgctgatgtgattacaattgaagcagctcgttcagatatggaattattagaatcatttaaaaaatttaaatatcctaatgaagtaggtccaggagcatacgatattcattcttctaatataccaagcgtacaatctataatttctcttttaaataaagcaatgaaatatattccattaaaacgtatatgggttaatccagattgcggtttaaaaacgagaaattggaacgaaacaatattatctttaaaaaatatggttgaagcaacgaaaatacttagagaaaaaatgaaagatagtgaatgtgattaaattgatttcttttttaatgattataatataatttaatattaaatcatcttttagaatattttaaaaaatctaaaatgatgatttaatacttataaatttttatatatttcaatagtcaaagactaatgtttaaaatgcctttttttagtaaaaatcatcgttatattatgttcatctgcagctcgaatgatttcttcatctcgtatagaacctcccggttgaattatagagctaataccgacagaagcagcttcatcgataccatctctaaaaggaaaaaaagcatcagaagccatagtggcaccaataatatttttaccctgatctttaacttttatattagctaatttagttgaataaatcctgctcatttgacccgcaccaattccgatagtaatttcatcagaaccatatacaattgcatttgattttacaaatttagcaacttgccaacaaaagatagagtctttgagttctttttttgttggactacgttttgtaacaaaactccatgagttataatctatattatgagaatcgtattcttgtacaagtagaccattagtgatcttttttaaatccaatccaactgtattattttgtaattttccagtaactagtactcttatattttgttttttttgtaatattttaactgcttttttactgatttcgggaataataataacttcaacaaattgttgattaataattgtttgtgctgttttttcatctaatttacagttaaaagaaattatacctccaaatgctgaaataggatcagaattgtatgcagataaatatgattctaaaatattatgactaacggcaacgctacaaggatttccatgttttacaataacacatgctggtttagtgaattgttttacacactctaatgctatatcagaatctgatatattattatatgataaagtttttccttgaatttgacatgctgtactaattgttccggaatcacacatgtttttttctatataaaaagacgatttttgatgatagttttctccatatcttaaatcttgttttttaataaaagaaaaatttatttcattcgggaataaactattattagtttttttatacaagctattttgttcaatgaaatactgagaaataatttgttcatagtatgatgtatattcaaatgctttagatgctaaattaaatcttttttccatattcattgtgttattgttaatagaatcaatagtagattgaaaatcatcaagatctactataactataacgttcttataattttttgcagaagcacgtacgagtgtcggtccgcctatatcaatattattgacaacattatctatatcatttttttttatgtttttgattttttcaaatggataaaagtttacgataactatatcaattggacaaatattatataatttcataatctcctgatctttttgtttttgtcctaaaataccacccataatttttggatgtaatgtttttactcgtccatccatgatttcaggaaattttgtataatctgatatttctgtaacaggtatattgtttttttttaaaatttgagccgttcctcctgttgaaaataaattaattttattaattattaatttttctgctacttctacaatattttttttgtctgaaacgctaattaacgcattttttataagattatttgatggcataatatattttcttatttttaaaaaaaaattaaaatattttgttatataatataaagatattttttatatttagactattttaaatatataatactaatttagtaaggggcactacgccccttctttaaatacttcataagttataattgtttgattgcattttttaatgttttaccagatgtaaaactaggaacttttgtagcaggtatctgtatttcttttcctgtttgaggatttcgtcctgtacgggacgatcttaaattaactttgaaagtaccaaaaccaactatttgtacagattcaccttttttcaaagaatcaatgatagttgataatgttgtttctaaagtcaattttgcttgtattttagataaattagattttttagaaatgacattaattaattgagttttattcattattatcccttttttatttatatgtaaaaattaataatttatttagatattttgtaaatataaattgaaaaaatttattttgaaaattatattttttgatgataaatttttttatacttatttgatataaaaagaaaaaatatattttttcatattataaattctatattaattaaacatgttatttttgaaaaaataatataaaaaaagaatcagatttcaaatttacaattgaataaaatttaaatatataatatatctaaaaatcatcaaaaaaatacggtatgaaaatcgcagttttatttttaataaattgttattttttttaaaaaataacagtattgatttctacatgatttcaattttattcaaattaaatagtgatatatttttattaaaattatctgatatgttttatgaatttgaagcgtttttatataaaatatatataagattttttatttttaaaataaattatttattatatatatttcaaatatatcattttaaattcactcctttattaaaccttcgaaatacaatgaatttttttaaaatagtacgaattttaaaaaatataatcactgtttttaaatagtatttttttaaataattattattttattttataaaatagtgttatatatttatattataatataaaattatcatgtttttactgtggctgcttttaagagcagccataatttatatatacaaaatattaagatgatttatttttctataagagcagaatttaataattctgaaagactagcagaagcttcttcagcactaatttgagaactgctaactgttggattgttatgttttttttgacgacgattcaaacgttctttgtgatatgcatatcctgttcctgcaggaattaaacgtccaacaattacattttcttttaatcctcttaattcatctctttttcctgcaactgcagattctgttaatactcttgttgtttcttggaaagaagctgcagatataaaagattctgtcgcaagtgatgctttagtaattcctaataaatctcttgaaaaagtagctggcattttcttttttttatctaacatgcgatttgatatttttatatgagaaaattcaacttgttcaccttccagaaaatctgaatctcttgatttaactacagtagcttttcgaagcatttgtcgtataattacttcaatatgtttgtcgttaatttttacaccttgtaaacgatatacttcttgtacttcattcactatatatctagttacagcttgaacacctcttaatcttaagatatcatgtggtgattccggcccatcagatatgacatctcctcgatctactcgttctccttcaaatacatttaattgtctccattttggaatcatttcttcataagaatcactaccatctactggtgtaattactaatcttcttttacctttagtttcttttccaaaagatataatgccactaatttccgctaaaattgctaattcttttgggcgtctagcttcaaataaatctgctactcttggtaatccacctgttatgtctttagtacctccagattcttgtgggactctcgctaatgtatcgcctgaactgatttgtactccgtcatcaagttgaacgattgcttttccaggtaagaaatattgagccggcatatctgttcctgaaataagaacatcatttccattacaatcgataatttttaatgctggtcttaaatctttaccactagacattctttctgctgtatctaatattactatagaagacaaacctgttagttcatctgcttgtcttgtaatactttgaccatcaatcatatctacaaaacgtactaacccattaacttcagtaataactggcatggtatgtggatcccattttgcaacagtttcccctgaatgtactttttcaccgtcccctttagccataatagctccataaggaactttatagctttcttttgttcttccaaaattatcgataatatttagttctacatttcttgaagtaattactgttttaccagcagaattaattacaaattttgcattattaagatttataataccttgattttttacttgaatactagattctgctgcagctctggatgctgcaccaccaatatggaaggttctcatagttagctgtgtgcctggctctcctatagattgtgcagcaattaccccaattgcttctcctttattgactaaattacctcgtgctaaatctcgaccatagcagtaagcgcatacaccaaaatcagtatcacaatttactactgatcgtactttgacattatctatagaattatgctctaaaagatcacaccatttttcatttagaagtgtatttcttttgattaatatatttttagtatttggaataataatattttctgcagtaacacgacctaaaacacgttcacgtagtggttcttttacatctcctccttcaattaatggagtcattaaaattccttcatgtgttcgacaatcatcttgtgttacaactaaatcttgagctacatctactaaacgacgtgttaagtatccagagtttgcagtttttagtgctgtatcagctaatcctttacgagctccatgtgtagaaataaaatattgtaatacattcaaaccttctctaaaattagctgtaattggtgtttcaataatagaaccatcaggtttggccatcaatcctctcataccagctaattgacgaatttgtgcggcagaaccacgtgcccctgaatcagccatcataaatatactattaaaagatatttgcttttgtttgtaaccttttttgttgataacagattctgtagataagttttgcatcatcgcttttgctactcgttcattagctgccgcccaaatatcaataactttattatatctttcacccgcagtcactaatccagattggaattgttcttgtatttcagcaacttcaatttcagcctcattgatgatatttgcctttttttctggtattaccatatcatcaatacctaccgaagctccagatcttgctgcataagcgaatccggtgtacataatttgatcagcaaaaaaaacagtagatttcagtcctaaaatacgataacaagtattaagcattttagaaatatcttttttacctaaagtttgattaacaatactaaaaggtagtccttttgggataatcatccacaaaattgctcgacctatagtagtaggaattattttttttattgcagtaaaacttttatcttcattttttttatattctattattcgaacttttactagtgaatgtagttcagcaatacctaaacggtatactttttctgcttcattagaaccatttaataacataccttcaccttttccattgattttttcgcgagtcatataatacaaccctaaaacaacatcttgagaaggtacaataattggttcaccatttgcaggtgataaaatgttattagttgacatcattaaagctctagcttctaactgtgattctagagttaatgggacatggacagccatttggtctccatcaaaatcagcattgtaagctgcacatactaatggatgaagttgaatagcttttccttctataaggactggctcaaatgcttgaatacctaatcgatgtaaagtaggtgcacgatttaaaagaactgggtgttcgcggattacttcgtctaaaatatcccacactattgcttcttctctttccaccattttttttgctgctttaatagtagtggctaaaccacgcacttctaatttgccatatatgaacggtttaaaaagttctaatgccatttttttaggtagaccacattgatgcaaatgaagataaggacctacagtaattactgaacgaccagaataatctacacgtttcccaagaagattttgtcgaaatcttccctgttttcctttaatcatatcagctaatgatttaagaggtcttttgtttgatcctgtaattgctctacctcttcgaccattatctaataaagcatctactgcttcttgtaacattcttttttcattgcgtacaattatatctggagctgctaaatctaataaacgtttaagacgattatttctattgatcactcgacgatacaaatcatttaaatctgatgttgcaaatctacctccatctaatggtactaatggtcttagatcaggtggtaatactggtaatacgttaagaatcatccattcaggtttattatgcgattgaataaaagattctaatagtttaattctttttgttaatttttttctttttgtttcagaatttgtttcatttagttctattctcaatacattacattcttgtactaaattaatatctttcaataaaaattgaatcgcttccgctcccattgtagcatgaaattcatctccaaattcttccaatgaatctagatattgttcttcggttaaaatttgacgtttttcaagattagtcatgcctgtttctatgacaacataagattcaaaatatagtactctttcaatatctcttaaaggcatatctaataataaacctattcttgatggcaaagattttaagaaccaaatatgagctgtaggtgaagaaagttctatatgacccattcgttcacgtctaactttgctttgtgttacttcaacaccacatttttcacaaattactcctctatgttttaatcttttatatttaccacacaaacattcgtaatcttttactggaccaaaaatgcgagcacaaaataatccatctcgttcaggtttaaatgtacgataattaatagtttcaggttttttgacttccccaaatgaccatgatctgatcatatcaggtgaagctaacgagattttaatagcatcaaaatcttcatttttagtttgggattttagaaattttagtaaatctttcacacgttagctctcgttggagtaaaacttttaaggtaaataaataatacataaatatttttataatattgctaattttgttattcgctttctagttcaatattaatccctaatgaccgaatttcttttaaaagtacattaaaagattctggcattccaggttccatttgatgatttccatctacaatatttttatacattttagttcttccattaacgtcatcagatttcacggttaacatttcttgtaacgtataagacgctccgtacgcctctaatgcccaaacttccatttcaccgaaacgctgtccaccaaactgagcttttccacctaatggttgttgagtcactaaactataagatccagtagaacgagcatgcattttatcgtctactaagtgatttaattttaacatatacatataaccaacagtaacaggtctttcaaatttttcgcctgttcttccatcaaaaagtataatttgacctgaagtaggtaaacctgcaaatttcaacatttgttttatttcattttcttgtgcaccatcaaataccggtgtagaaatagggatgccattttttaaattctttgctaaacgtaatatttcttcattggaaaatgtatctaaatttactttttgtctcaggttatctcctaagtcaaaagctttttgtataaattttcgtaaattagatattttttcttgtgttttaagcatatgattgattttatcaccaataccttttgccgccatacctaaatgtgtttctagtatctgaccgatattcatacgagagggtacacctaatggatttaaaacaatatcaactggtataccattttcgtcataaggcatatcttcaacaggattaattttagaaattactcctttatttccatgtcttcctgccattttatcgccaggttgaatctgacgtttaactgctaaatacactttaactatttttaaaacaccaggagcaagatcatcgccttgtgtaattttttgacgttttatttctatttttttattaaattcttcttttaattcatgatgttgtttagcaagtttttctatttctttttttttgtctttttgtttaatgtctacagaaaaccatttttcaaaaggtagtgtatcaagctgttttgtttcaatatcaagcgatataaaagtttttttaatatgagtaaataaactagattcaaatattttgaattcttcagtaagatcttgtttgattttcttcagttgcatgtcttcaatttctaaagctcttttatctttttttacaccatctcttgtaaatatttgtacatctatcacggtacctgatactccattcggtactcgtaatgaagaatcttttacatctgatgctttttcaccaaaaatagcacgtaataatttttcttctggagttaattgtgtttccccttttggagttactttgccaactagtatgtcgccgccagttacttctgctccaatataaacaattcctgattcgtctaatttagataatgcagcttctcctacatttggtatatctgaactaatttcttctgctcctaatttagtatctcttgatatacaagataactcctgaatatgaattgtggtgaagcgatcttcttgaacaaccctttctgagactaatattgaatcttcaaaattgtatccattccatggcataaatgctacacgcatattttgtcctaatgcaagttctcctaaatctgtagatggaccgtctgctagaacatcaccttttttaattttttcgcctaaattaacgcagggctgttgattaatacaagtattttgattagatcgagtatatttagtaagattataaatatctattccagcttctcttgaatacatttctttttcatctacttttattactatacgtgaagcatctacatattgaacaacaccacttcttttagctactgctgtaacaccagaatctactgctactgctcgttccattccggtccctatcaaaggtttatctgttttaagggtaggtactgcttgacgttgcatattagcacccatcagtgctctattagcatcatcatgttcaggaaaaggaattaaagacgctccaacagatacaatttgttgagtagatacatccatataatttacttgattacggttgaataaactagattcgcctttatgtcggcaagttactaaatcgtcagtaaaaaaaccagttttatcgatattagtattagcttgtgcaataatataattgccttcttctatagctgatagataatgaatttcctcactaactaaaccgttacaaacttttcgataaggtgtttctaaaaatccatgagaatttgtttgagcgtacacagataaagaattaattaatccaatattcggaccttctggtgtttcgataggacatactcgtccataatgtgttggatgtacatctcgaacttcaaaacctgctctttctctggttaaaccacctaaacctaatgctgaaattcttcttttatgcgtaatttctgataaaggattattttgatccataaattgtgataattgactagaaccaaaaaattctttaaccgcagctgatattggtttagcattaatcatatcttgtggcataagcgcatctaaatcgccgatagacaatctttctttaactgctctttccactcttactaaaccgattctaaattggttttccgccatttcacctactgatctaacacgtcgatttcctagatgatcaatatcatctacttctccttttccatttcggatatcgataattttttttataacatcaatgatgtcttctttatttaacgtacttgaacctttagtttcttcacgtaaaagggatctgttaaatttcattctacctacagtagaaagatcgtatctgtcttcagaaaaaaataaattttcgaataaattttctgttgcctctttagtaggtggttctcctggcctcataactcgataaatttctattaaagcactcatacgatcattagatgaatctattcgtaacgtttctgatatatatggaccatgatctaaatcattagtaaacaatgtttcaatagagtagaaacctaatttttttaatttttctaatatctctaaagataattctgtattagaagaaataattgtttcgcctgtttttttatctacataatttttagatacaattcttccaagaatatattcaacaggaactgtgatagattttattttattattttttaattcttgaatatgtttagcagtaatacgacgacctttttctacatatattattccattttttttaatattaaatgatgcagtttcacctcggagtctttcgggaactaattctaatacaattttgttattttctattttaaaaatatttttctcaaaaaatatgtttaatatttcttctgtattataattaagagcccgcaaaataatgcttactggtagctttctacgtctatcaattctaacaaataaattatcttttggatcaaattcaaaatctaaccaagaaccgcgataaggaataatccgggcattatatagaacttttcctgaggagtgtgttttacctttatcactatcaaaaaagactccaggactacggtgtaactgagaaacaactactctttctgttccatttattataaatgttccattgttagtcattaatggaatttcacccatatatacttcttgttctttaatgtctttaacagtagcttctaatatgtcacgttcgtagataacaaggcgtaattttactctcagtgccgccgaataagtagcacctcttatttgacattctttaacatcaaatattgtttctcctaaacggtaactaacatattgtaattcagagtttccattataaccgcgaataggaaatacagaacgaaatgctgcttctaatccgtgttgacctgataaatctggttgaataaattttttaaaagaatttaattgaatcgaaagaagatatggtatatctaacactttaggacgtttgccaaaatctttacgaatacgttttttttcggtataagagtaaaccatggggttcctaagctcgttgacagataagttgaaaattaatttatctttttgtctgaaggggagacagttttaatatttccgtaagaattttaattacattttgtattttttttaaatgttttttaaaaaatgatttgaattttattttgatcaacagggctggtgaagcaacatcaccagccgtatttgaaaattaattaaattataaaatttaatatttttatttaatttcgatttcggcaccaacatcttccaatgtttttttaagtgattctgcgtcttctttgctgatattttcttttaaaactgttggggcagattctactaaatctttggcttcttttagtcctagaccggttgcactacgtacagttttaattactgacactttatttggcccaataacttttaaaaaaatatcaaattctgttttttcttcgcgtaaatctttttcattatggttgttgctattaatagacatgctagcagagacaccaaatttctcttccattgctgtaataagatctacaacattcataacagacatttctgatatagcttctaagatttgttctttagtaatagacataacaataattcctaataaccattagaattattttagatgttattaatacatcaaaaataataacctttaagaggtttcttttttctgttttatagcagataatgtataaattagttttccggcaatcaacatcttccatgttaacagaagtttgattattgcttctttataagtaggcatatctgcaagttgattaatttctaaaatagagagtaattttccttcaaaagctgctcctgtaattttaaattgtgtgtttttttttgaaaattctttaaataatctagcaccactacctggatgtatcatagaataagcgataaaggtagagccttttaattttttttttaaacactcaaaaacagtatttttaattgctaaagacaacagagtgttttgaacaatgctcattttcactcctacttcacgtccagattttcttaactcgtttattttatttacacacacaccctgtaaatctgcagtaacagctgataatgctgtgttagatattttattaatttttgaaacaattattttcttgtcatgaatacttaatgccatttatcagattttccttattgatctagagaaaaataatttgaattaattttaaagaaagacagtaagcatgataattcgttttttcaaaatatactttgatagaattttattctatgactatagtaaaaacattgaataataaattttcagtactaaaattagattgtttttaaatatttttaattaaaaaaactttgaatactagttaaaaaaaggttattattataaataatttttcttatagcgtaaagtggaaatcattttcttacagcgataaagtagactgatcaaccattaatcctacacccatagttgttgataaaactattttttttatatatatccctttggattgcggcggttttgcttttttaatagattctaaaaacacatttaaattttcttttatctcatttttatgaaaattaattcgaccaattgtagcatgaataatcccgtttttatcatttcgataacgtacttgtcctgtttttgcatttttaatggcttcagcaatatttgttgttattgttcctaatttagtattaggcattaagttgcgaggacctagtatttgtcctagttgtgttactattttcattgcatcaggggtcgcaataacaacatcaaaatcaacaccttcttttttaattttttccgataaatcctccatccctattaattctgcacctgcatctttagctattgcaatattatcaccttgtgtaaatacggctactcgaatagaacggccgataccatttggtaatactgttgagcttcgaatattctgatcggattttttagaatttatacctaaattaattgctatatcaatgctttcattaaattttactgtcgatgatttttttaataagtctattgtctcgtcaatatggtgtaattttgcaaaattaatatgttcttttatttttttcatacgtttagtttttttattcattattatccctcaataattagacccatagatttagcagtaccttctatagatcgcatcatgttttcaatattagaaccagtcatgtcattatttttaataattgctatctctttgatttgtgagcgatttatttttcctattttttctgatttatttttactagaaccttttttaattccagatagtttttttaataatacagaagcaggaggagtttttgtaataaatgtaaatgaacgatcagaataaactgtaattattactggtatgggaagtcctttttctatattttctgtttttttattaaatagtttacaaaactccatgatattcacacctttttggcctaaagctggaccaattggtggactaggattagctgcaccagctgaaacttgtagcttgatatatgattgtattttttttgccattattttctcattttatataaaatttttattaaaatttacaagatatgttaatttttttcaacttgtctaaaatctagttcgaccggagtagatcttccaaaaatagaaacagaaactttcagtctacttttttcataatcaacttcttctacaacaccattaaaatcagcaaaaggaccatcattgacgcggatcatttctcctggttcgaataaggtttttggtcttggtttattaccaattttacgtagtctattaatgataatttctacttctttgtcactaatcggtgaaggtttatctgatttccccccaataaaacctaaaacttttgggacatttctaattaaatgccaggttgaatctgtcattttcatttgtatcaaaacatatccaggaaaaaatttatattcgctttttctgcgttgtccacctcgtatttcaacaacctcttgagaagggaccattacttctccgaataaatcttccatttgatttaatttcacatgttcccgtattgattgtgctacacgactttcgaatccagaaaaagcttgtaatacataccatctctttttttgactctcatgcattgttagaaccttaaactaataataaatgctattaaacgaaagattacactatctatactccataaaataaaggatataaagattgttacagaaatcacaatgaatgtagtatataaagtttctttatatttaggccatattattttttgcatctcttttttggacattactatatataataatatatcttttccctttttcgtgtatatcatagtacctattgcacagagcattaaacaggatataataaatatacgtataaataattgtgtctcgtaaaaacacatattaataaaaaaagatagaataaaaaatatagatatagatatccattttactttttctggaattttatgcttatttcgattgtagtgatgtttattcataatttctcctaaaattataaaataatatagaaaaaatatgttaatacataaaaaatttcattcttttttttatttttaaaaattatattttcaaatgaaaaaaattttcgttattgtgaaaattataaactattaaaataaactatttttttttaaaatagattaatttttttatgaagtaagtgtagaagttttaatatatagaatattttaaaataaaaagtattaggtgagagttatgataaatgatttgaaaaatatttatttaaaaaattaaattattttagatgatattaaataaattttagttattatgctgatacccaggattgaactggggacctcacccttaccaagggtgtgctctacctactgagccatatcagcagttttcatttttttagcggacagcgggaattgaacccgcgtcatcagcttggaaggctgaggtaatagccattatacgatgtccgcatatttttatagtttttatagttggtggtgggagaaggattcgaaccttcgaagtctatgacggcagatttacagtctgctccctttggccgctcgggaaccccaccttaaaaataattttatgccggctaccggaattgaactggtgacctactgattacaagtcagttgctctgcctgctgagctaagccggctattttttataatattttagttattttttaaaataacaattttaaatgaattatattatataatttttcatttgtatgcaagtttttttatttaaaaataatattaatagaaagtattatatttttttgatctgtatttatataactttcaacttactgtttaatttaaaaattttcgatgcttttatttttccggatgctccgataagatctacttctggttctaataatatattaaatttttttaaaatacatttgtgtattattttagctaattttataatttcttgagcagtggcattttttttattaattaatataagtttttgttttttatgaatagctgcatcgccaatttgaagatgtttaaatttataattttcaattaaccaagcagcagaaattttcactaaaccgtttttttgtggataatttggtactttatataaatttattagtttttgtgcttttttctttttaattagggggtttttaaaaaaactgcctgcattgccgattttttttggatcaggtaatttttttttacgtattttacatattatattgaaaatcttgtatgcagttatatttattggtgtaatataattttctaatgaagaaaaaagaattggacgccatttctttgacagctttatcccgactctaataacagcatgttcatttttgtattgatctttaaaaatactattacgataggaaaatttacaagaatttttataaattcttttaattgtattgtcttttaaagacaatatatcaacgtattgacatacatctttaaattctaatccgtatgcgccaatgttttgaatagctgcggatcctatacaacccggaattaatgctaaattttctaatcctaaaatacctaaattcaatgttaattttactaaattatgccatttttctcctgaaaaaacatgcaataaccaaaaattttttttttctactatttttattcctttaatacgattaataattacgactcctacataattttccaaaaataatacattacttccctctcctaaaattatataaggaatattagataattggcaaattttagatatatcaattagtgattgaatcgtttttacaaaaattattttttttgctgttacatctattgcaaatgtgtttaaatcttttagtgattgactagaaaaatatttttttttatgcatagaaaatcgattaataattttattagtttttttataataatcaatacatattcattagtatatagtgatttttttgaaaaattttagataaattcattttaatggaattttataatgaaaaattattctcagtatcatcaagatataatgaatcaaaaattagaaaacattcgcaataatatacagtgttcttttgaattttttccgccgaaaaattcttttttagaagaaaatttatggtctacagttaaccgtctttccttattaaaaccaaaatttttttctgtaacttatggcgcaaatactggtgaacgtgaaaaaacatatgatactgtacagaagatatataaaaaaacaggtattattacagcggctcatttaacttgtattgattccacacctcataaattaaaagaaatagcatacaattattggaatagcggaattaaaagtattgtagcacttagaggagatacattagaaaaagattataggcatactatgtatgcagtagatttagttcttttattaaaaaaaatagctgactttgacatttccgtagccgcttatcctgaattacatcctgaatcaaaaaacgttaaatcagatatactgaatttaaagaaaaaagttgatgcaggtgcgagcagagcaattactcagttcttttttaatattgaaagttatttgcgttttcgagataattgtattaaaaataaaataaatattgatattataccaggtattttaccggtatgtaattttcagaaattaaaacgtttttcaagtatgactaatgttaaaattccaaaatggatgcttgatatgtttaatggtttagatgatgatatattcacacagaaaataattggttctagtatagctatagatatggtaaaaaaattatcttgtgaaggagtaaaaaattttcatttttacactttaaatcagtctgatattacttattctatttgtcatatcttaggtctataaaaatctttaatttaataacaaaatttatttattaatttagtaataatgttttttgtgggttgaataaaataatgttctaaatattcatctggctgatgtgcttgttcaatagaacctggtcctaatattaaagtaggtgcaattctttgaagaaaaggtgcttctgtacagtaatttactgctgcactattgagttgacataatttttcgactattttaatagttccgctattatgcggacattcataagcaggaacagaagaaaaaagttttttaataaagatacgatgagaccattttttcatgattgtttctaatttttctttaattacaatttcaatttgtgttaaagtgagtccaggtatgggtcttatttcaaaatttaatatacataaaggacaaattcgattaattgcactacctccgtgtatagaagataaattcatggttggatatggaatagaaaagtttggatgctggtattcttctttaaaatactttttcaaaatcaataaagaacgaataacatcatgcataatttcaatactattcacaccatgatcaggattactagagtgtcccgtatctccaatgactttaattgaataagacatgtgacctttatgtgcattgattagctttaaagatgttggttctccaattattatgcaatctggtttaataatagtcgattgtataaaatttctagctccagacatatctgtttcttcgttagcagtagcaagaatataaattggtttatttattttttttatatttatagaagatattacttctaatataagagcaaaaaaccctttcatatctacggctcctaatccataaaatttattgttagtttcagttaatttgaaaggatcttttgtccattttttttcatcaaaatctaccgtatctgaatgtccagacaataaaagaccgccatttcctgaaccaacacaagctaacatgttatacttatcagtatgtggaatttgataattttttactgaaaaatttaaatcagaaaagtagttagacagtagatcaatgaaatttttattactttgatcaagtagtttgttattactgctaattgtaggaatttgaattagtgacttataaacttcaataaaagaaggtatttttcttatcatactagaattttaaaaatttatattattattgtaatgtaaaatattttattcataaatagataattgatcaatattttaataatataaaatatattttttataaaatttaatacattattttatctataaaagagtaatttttttaaggtttattaattttatgttaaatgtagtaattgttggtgctagtggatatgctggcgcagaattggttaactatatgcaccgtcataggtttgctaatataaaaaaaatatttgtatcaaaaaatagtttaaatatagataaattgttttcggatgttcatcaacaatttaaaaatattgtggatctcagatttgatacaatacgtaattgtactttaattaaaaaaaatattgatgctgtttttttagctacagatcatcgtgttagtcattctcttgttcctttttttttatcgtctaattgtattgtttttgatttgtctgcttcttacagaatgaacaataaaaaagtgtatttggattattatggctttgttcatgaatatgaagaacttttaaaaaattcagtttatggattagcagaatgggaacaagaaaaaattaaaaaagcaaatctgattgcattacctgggtgttatgcaacttgcattcaattagcgctcaaacctcttataaaagaaaatgttctttgcgataaaaatataccaattattaacgctattagtggtgttagtggtgccggtagaaaagcttctttaaataatagtttttgcgaagtaagtttacaaccatataatattttcactcatcgtcatacgcctgaaattatagaaaaattaggtgttccagtaatttttatcccacatttaggccctttttctcgaggtataattgcaactattacatgcaaattaaaacctaatgttaaatcaattgatatacacaatattttcaataaattctataaaaataaaccgttaattcgtatatataaaaaatatttacctagtattaaatcagttgaaaaacaaccattttgtgatattggatttgtaattaaggacgactatatagtaattgtggcagcagaagataatttgttaaagggtgctgctgctcaagcagtacaatgttttaatgttcgttttggtttttctgaaacggaatcaattatttaattaataatcaggcgttgataatgaatcctttagttattaaattaggcggagtacttttagaaagtgacgatgctatgaagcgtttatttgaagctttagttgattatcagaaattttataagcgtcatgtgtcagtgattcatgggggaggtcgtttaattgacaatttaatgaataaactgtctttaccagttaaaaagaaaaatggcttacgtattactccgtctgaacatatcaatattattacaggagctttagctggaactgctaacaaaactttacttgcgtgggcattaaaatataatattaatgctattggattatgtttagcagatggaggaagtgttgatgtagaaagattagatgaaaatttaggtcatgtaggtaaagcgataccgggatcaccattatttttaaaaaaactctttaaagaaggtactattccaattattagttctataggaattactaaagatggtttattaatgaatgtaaatgctgatttagcagcaacagctttagcaaccactttacaagctaatttaattttattatctgatataagttcgatattagacggcaagggacaaagaatcacagaaattgatagcattcaagctgaaaaattgattatgcaaggaattattactaatggtatgattgttaaagtacgtgctgctttagaagctgctcgagttttacgtcgtcctgtagatatagcaagttggcaaaatacagaaaaattaaaattattatttaatggtgtgaatattggcactcgagtttatgtatgatattactataaatatagtaggtttaaaaaatgataagaaaaaaaaataataaagttgttttagcttattctggcggtttagatacttctgcaattattccatggcttaaagaaaattataattttgaagttgttgcttttgtagcagacataggacaatcaaaaaaagatttaaatggaattgaaaaaaaatctttagaatctggcgcatctagttgtcatgtttttgatttaaaagaagaatttatagaaaattatgtctatcctgtactaaaaactggagctttatatgaaggcagttatttgttaggaacagcaatggccagacctattattgcaaagaaacaagtagaactcgcattgaatattggagcaaattcactatgtcatggtgctactgggaaaggaaatgaccaagtacgttttgaaatggcttatgccgctttagctccgaatttaaatgtaattgcaccgtggcgggaatggaatcttaattcacgagaatcattattaaaatatttagataaaaaaaacatctctacaacagcaacattagaaaaaatatatagtaaagatgaaaattcctggcatatttcaactgaaggaggtttgctagaaaatccttggaatcaatctaatgaagattgttggagctggacggttaatcctgaggatgctccagaaaaaccggaatatgtttcattgcaattaaaagaaggctgcgtagtatccgttaacaatcaaaaattaaatccgttaaaatgtgtagaagaattaaatagtttaggtgctaaacatggaattggtagaattgatattattgaaaatagattaattggaatgaaatctaggggatgttatgaaacacctggaggtactattattatgacagctataaaagccatcgaacagttagttttagatcgtgaaagttttcgatggagggaaaaaataggtttagaaatgtcatctattgtttatgacggacgttggttttctccaatacgtaaatctttacaagccgctgctgattcattgtctttggaaataactggagaagtaatattaaaattatataaaggctctgtcacagctgttcagaaaaaatctcctaattccttatattctgaagaatatgccacttttggtgaggataaagtgtataagcaatctgatgcagatggttttattcgtcttttttctctttcttcaaagatacgagcacaaaatatgttgaagtagttttaaaaaagtcacaaatatatttacagaattttacatttaattttttcagttttttatagagataatatatgggactttggggtggacgattcattaatgaatctaataaattatttaaagaatttaatagatctttatcttttgattatattttagcagaagaagatgtaatttcttcagttgcttggtctaaaattttaatgaaaagcaagattattactgaaaaagaacagattacaatagagtctgcactttttgaactacttaaagaaattaaagagaataatcaaaaaatccttaaaagcaagtgcgaagatattcatagctggatagaagaaaagcttattcaaaaaattggtatattaggtaaaaaattacatactggtcggagtagaaatgatcaaattactactgatttaaaattatggtgtagaaagaaaattcatcttttattagaaaatattattgaactgcaaaaaacatttattttaagtgctgagtctaatcataatatcatcatgccaggatatactcatctacaacgagctcaaccgattactttttcctattggtgtttagcttatgttgaaatgttcagacgagatttcagtcgtttaaaagacgtcctgaaacgattaaacgttagtcctctaggttctgctgctctttctggaaccgcatggaaaatcaatcgtgaagaattagctttatctatgggatttgactctgcaactaacaatgcgcttgatactgtttctgatcgagattatgtcgttgaattattgtcctctgcatcaattagtatgatgcatctatcacgtttttctgaagatataattttttttaattctggtgaagctgattttattgaattatctgatacaattacatcgggttcatcattaatgcctcagaaaaaaaatccagatgcactagaacttattcgagccaaatgtggtcgtgttcatggttcattgatttctattttagttatattaaaatcccttcctttatcttataataaagatatgcaagaagataaagaaggtttatttgattcaataaaaacatggaatgattgtttatgtatggctattttagtattgaagaacatgcaaataaaaaatgaatcatgtcgtaaagctgcagaagaaggatattctaatgcaacagaaatcgcggattatttggtaaaaaaaggaattgcttttcgtgaagcacataatatatcgggtcaattagttcttagagctattagcgagaaaaaatctttaaacgaactgaaactatctgtttttcaaatgtatagtaatctcataaaaaatgatatatataaaaatattactttagaatcctgtcttgaaaaaagaatgtctaaaggtggtgttgcaccatctcaagtatatgaagaaattataaaagcaaaaaaaagattgaatattttttaaagtaggatacttgttaactagcatttaaaaattatttaaatgctgagttaataaccttatcaagtataggagagtggatatatgcaggatgtaatatttttcttgagtaaacacattttactaattagtatatggattttttgttttattgcagccgttttttttataactagaactcttttgtcgaaatctaaaatgattaataattttcaagcaattaaattaattaatcaagataaagctattgttgttgatactcgttctttagaatcattcaaagagggtcatattcttaattctattaatgttccgttaaaaaatatttttttaggaaaaattaaagagatagaaatatataaaatgtttcctattattcttgtattaagtgacacatataaagttaatgcatgtattaaaaagttttttgaatatggatttaatcgtgtttatattttaaaaaatggtctatattattggaagacagacaatcttccacttattgttaacgataaatgattttaaaaagtataaaatgatctttttattaaaatatcttctttataaattaattttataaacaatatcaacttatatctttttattatttttttttggatccgttatgttagaagaaaaaaaaaaacaagaatcttttgaaatccaacgtatttatataaaagatgtttcctttgaagctccgaatacaccaaatatttttcatgttaattggattcctaccattaaattaaatttaaatactactactaaaaaaataaaagaaaatatttttgaagttgttttaatggttaaagtaacagttaaaattaaagaagacttagtttttttatgtgatatagatcaagctggtattttttttattgcaaacattaatgagaaaagattaaaacattgtttatattcttactgtccaaatattctatttccctatgcgcgtacatgtatatctaatctagtatcttgtggcagttttccacagatgaatctcgctcctattaattttgatgctctctatcatgatcatattaaataaaaaaaatataaaaatataaattacgaatatactcatttttataagataataatataattttttagtataaaaatactataaatattttgtaggagaaaattatgtgtattttgaaaatatcaagaatatggaataaaatactctacgatgtttcttttttattaaaaaaagaaccaattttatcagatttttaccaaagtagtattttacaacaccaaagttttacaagttctttaagttatatattatcaaataaattatctacatctatgatttctgaaaagaaaatacaaggtatatttgatgatgtatatctgaatgatcgttctattttaaattttatagtgcaagatattaaggctgtactaaaacgagatccagcagtaaatgattatttaacacctttactttatttaaaaggtttccatgcactagaagcttatagaataagtcattatctctggaatacagggaaaaaatcattatctctgtatctgcaaagtagaatctcttctgaattttctgtagatattcatccagcagcgtttattggatctggtgtaatgcttgatcatgcaactggcattgtaatcggagaaggtgtgactatagaaaatgatgtatcaattcttcattcggttactttaggaggaactggtaaaaactttagccaaaatagacatcctactattagaaaaggcgttgttataggggcgggtgccaaaattttaggaaatattgaagtaggttcaggcgcgaaaataggtgcgggatcaatagttttaaaaaatgttccttcagatgtaacagttgtaggagtaccagcgaaaattgttagtcaagtatctagtaaaaagtattattctcagaagaaaaaaaatagtttaaaatatataaatatatttcaacacggagatggtatttaatttatttcttatataaaataaaaacttctgttttgttcgaaaaaaatatagtggttagactaataccagtacagaagctttattttatatttaattcttctatttttaatcgtctaaaaaactgcgcaaaacttctgatctgctgggatgacgtagttttctaagtgcttttgcttctatttgacgaattctctctcgagtaacatcaaattgttttccaacttcttctaaagtgtgatcagtattcatatctattccaaagcgcatacggagtacttttgcttcacgagctgttaaacctgatagaacatcatgtgttgcagaacgtaaactttcagaggtagcagagtctaatggtaattccaaagtagtatcttcaataaaatcacctaaatgtgaatcatcatcatctccaataggtgtttccattgagatcggttctttggctattttcaatacttttctaattttatcttcaggaataagcattttttcagaaagttcttctggagtcggttctcgacctatttcttgtaacatttgtctagaaatacgattgagtttattaatagtttcaatcatatgtactggaatacgaattgtacgagcttgatcagcaatagatcgagtaatagcttgtcgaatccaccaagtagcataagttgaaaacttataaccacgacggtattcaaatttatctacagctttcattaaaccaatatttccttcttgaattaagtctaaaaactgtagtcctctattcgtatatttttttgcgatagaaataactaatcgtaaattagcttcgaccatttcttttttcgctcgtctagcttttgcttctccaatagacattcttttattaatatcttttacttgttcaattgttaagccagtttcttcttctattttaattaattttttcacactaataaacacatcttctttaactttttttaagttttcagaccatggttgatttgtattttgttctcttataaaccaaagatagttaattttttttattggaaaaattttaataaaatttttttttggcattttacatatttcaacacataattttataataattctttcttgttttcgtactctttccatcatatgtctcatattattaactaaatgatcaaattgttttggaactagtcgaaattgtttaaaaacttctgaaagattgtaaatttctaataatgaatctttatgtgttcgatttttatttttaattgtattatttgtattattatattgtatacgtaattcagaaaatttttcattagctaattctggatcaatactatgatcatcttcatgatcttcttgattgttttcttcgtcttcttcattattttgttgttcatcaagaagttcagaacctatatgaatagctgtaggggggaaaatttcttctgcattgggatctacaaaacctgttattatatctgataatcgtatttgtccagttttaacacgatcatattgttcaagaagatatgtaatggcttctggatactctgatactgagcattgaacctgattaatgccttcttcaatacgtttagcaatatcaatttctccttctcgtgtgagtaattcaacagtacccatttctctcatatacatgcgtacaggatcagtagttcgtcctaattcagattctacactagatagtacctgagttgctgcttcaactgcatcttcatctgtatctgtattgatttcatttaatattagatcgtcagcatcaggtgcttcttcaactactggaatgcccatgtcattaatcatctgaataatatcatcgatttgttcagaatcaataatgtcttctggtagatgatcattcacttcagaataggttaaatacccttgctccttaccatgtgtgacaagtagcttaagttgcgactgtgggttttgatccataatgtggtatccggaattctattaattgaatgaatattaattgacttttttgtcaatgatgaataataataaaattatttttaatatttaaataaattaaagagttttttaattcattaaacttttagtatatttaatttttattatattttttaataagtataattttatcttttcgataactttttattaatagaccaaatctcttttttttcattcatttgcaatcctttttttctctcttttgcaataagatattctcgtcttttttcaaggattttatcatgtatattcattaataaatctaaaaacatgttttgagtttctttttgaattatcatgtgatcccatcgtgctaaaatttttaaaacattaattattgtagtatttctgtatagttctaataattgacccgtatgaatattaggattatcacgacatgtctgtaatatttctaaaaaaatagataatccttttatttgtaaatttttaaatttcattgtcacaggcactagttttgctaaactaggattttgtactaataatcctattaaagtacgcatgggagtacgttttatttggaaatatgttttttgagtatttttagtttctttttcatataaaaatttttcaaattgattatcatctaaaattcctatcattctagctaatatttgacgcaaataaattcttatagtgtcactagaaatcgtatttattaaaggtaaagcatgtacgcttaaatgaaatttgtcatcatcagatgataaattgatattttttagtatatttttaaaaaaaaattttgacatggtaattgcgttatcaattcgtttttgaaatttttctctaccttcttttctaataattgtatcaggatcttcctggttaggtaataaaataaattttaatgtttttttgtctgatatatacggcaaggctttttttaaagttttccaagctgcattttttcctgcatcatcaccatcatagcaacatataatgatatcagtatttttaaagagaagttgaatgtgttcagttgttgttgaagttcctaatatagaaacagcataatcgatattatattgtgttaatgttataacatcaatatacccctcaacaaccaataaatatacaggttttgaacatttttttataacttgatataatccatatatttgttttcttttataaaaaatatctgtttcaggtgagttaagatattttggtgacatatcatttaatgagcggcccccaaaacctatgattctgccatgattatcttgtataggaaatattatacgtccttgaaatcgatcatatatatatccgtttttgtcagtagcaataatattgtttattaataattcttgttcaaattctttacttatatttatttttttataaaattcgttccattttaaactagaaaatccaattaaaaaaaaatcaatcatattttggttgatacctcttctagctagatatttattagctaaatgagtaacattaatattttttttgtataatttacatattttttccattaataaatataacttttgttttttaacataaatagaattttgtactgtattttcaaatggtattttaacaccatgtattaacgctagttcttcgatgctttctataaaacttaaatgttcatactgtattaaaaaatcaattgcgtttccatgtgcattacatccgaaacaataataaaattgtttttcattactgacggtaaaagatggagttttatcatgatgaaaaggacaatttgtttgataatttttaccatatttttttaattctagacgtgtattaattaattctatgatattagttcgagacagtagttcagtaataaagtatttaggtatttttccagacatataattttataattatagaattcgtttccgttcttgaacaagaacggctttttttatttattttatgttttaaaacatatttagtacatacgaatacgtcttgcattttctcttgtaagtttttttgcaagacgtttgacagccgaagctttagctcgtttgcgttcggttgtaggtttttcataaaattctcttcgacgaatttcagctaaaatgccagctttttcacaagaccgtttaaaacggcggagtgctacatcaaatggttcattttcgcgtacttttattattggcattcaaaatttaccttaattatttaatttatgtgataaaaaattatcgaaatttttaggataatagatcctatatcaattagtgtgatattgtaaagtatcatttttttatgttttaatgcagttttaattaaatatttagattagttcatttaaaatgaatgttcattttaaaatttatgtcaaatatattttttcttattgtaaaaatttataatatatagaggtttaaatttatgagaatattaggtattgagacttcttgtgatgatacaggaatagctatttatgatactaacaaaggtttgttaattaatgagatatataatcaaagaaagttaaacaatatatatggaggtattattccagaattagcatctcgagaacatatggaagcaatgattgttttattaaataaaatatttaagaaaaaaaatatttataaatatgttgatatgattgcttatactgcaggacctggtttaattggttcattattagttggagctacatttgcttgttcattagggttatcattaaatataccagttctacctgtgcatcatatggaagcgcatttattatcaccgatgttagactataaaacaattcaatttccatttattggattattggtatcgggaaaacatacacaaattataggtgcacataaatttggtgagtatgaaatacttggaaattgtttagatgatgcagcaggtgaagcatttgataagacagcaaaattattaggattaaaatatccaggtggtttagaattatctaaattagcttctaagggaataaaagattatttttattttcccagaccgatgatacatcattctgatttaaattttagcttttcaggtttgaaaacttttgcagctcaaacgattaagaaatccagtaaaagtatgcaagaaaaagctaatattgcaaaagcttttgaagatgcagtaattgatatattattaattaaaactaaaaaagcattaaaaaaacaaaaatggaaacgtttagttatagctggtggtgttagtgcaaatcaaaaattacgtaaaaaatccgagatcatggttaaaaaaaattttaatggaacagttttttattcaagtttagaattttgtacagataatgctgcgatgattgcctatcttggttcattgcgtcaaaaagaagcgcggaattctcaattagaaatattggttaaaccaaaatggtctatagatgatttatgtttttaatataaaaaattaagtcttgtatggttaatacttgcatttttttattttcagaaaattttattatttcaggggtacgagccatggtaccatctttatttgttaattcacaaataaccccggctggtttgaaacctgctagagaaacaatttctatagcagcttctgtgtgtcctggtcttgataaaactccgcctttatgagctcgcagaggaaatacatgacctggtctatttaaatcacttggtttagcgtcatcagcaatagcggtttttatagtagtgagtctatctttagctgatacgccagtagatatacctttagaagcttctattgtgactgtaaatccggtgcgatatgcgctagtatttttcttaaccatcataggtaaattaagttgtttccgtttagattcggttatacaaagacatactattccactaccgtaccgaatacttagagccatttgttctactgtcatattttcacatgcaaaaacaagatctccttcgttttcacgttcttcatcatctaatataataacaccttgtccggacttcaaagcaagtattgcatttttaattctttctataggttttccaaatttagataatagtgtttgattcattataaaaatcttaatagagttaaattatttaaaaaaagttttatttatagaaaaattagttaaattttatgtttgtatagttaatatattatatattgaattaaatttaagagcaatgtagaaattattatattgaataatattttttcaattttttatctattagcattctaaacaacatattgatataaaattttacttcgatttttttttaaaagcttacttgaaaaaatagaccaaataaaaatacaaaaattaaataacagtacttttattgatggtttaaaacagaatttaactcattaatattcaatgtttcagttccaattttctgtataacaatactggctccaatattggcataaaaacaagcttcttctaaagaatatccagttgctaaagatgctgcaattatagcgatcactgtatctcctgcaccagttacatctgaagctattttagatgcggcaggaaaatgtattggttttttttctttttgaaatagagtcattccattcttagaacgagtaactaataaagctgataactgtagttcagataataattttatccctctttgtagtatttcattttctctataacatttgccaactatcttttcaaattcaaaaagatttggtgttaataaactagctcccgaatattttttaaaatctattcctttaggatctataagtatagggatagacattttttttgcaagatcaataatattttgtatatttgccaaagtgccttttgcataatctgaaagtactaaaattttaaaagacgatattgaatcaataattttttgatgtaatagattgtttttattagaaatatatttttcttgaaaatccactcgaattaattgttttttctctgataagattctaatcttagtaatagttttattgttttttatagagattaaatcagaatcaattcgaatatgatccataagtttttttaatattaatccttcattatccattccaataaaaccaacaattttagtataccccccaatctctgcaatatttttagctacatttgcagcacctccaggttgttctttgattttattaattggtacaattggtgttaattgttcagatagcatatagtgatttttgctataccaataacaatctagtattagatctccgacaactaaaactagtgagttattgaaatttattaattttttcttcatagtgttatctctgtatattttaaagaatataatgaaaattaaaaattcaatttttttataaatataaacatttgaaagtttaatagatattttttatttaatatataaatattattatattattgaattgtggaaaaataataaataattatataaaaaattctatttttctattatagaatagaattttgtttttagtatgagaaaattattatgaaaatatatttagtaggaggagctgtgcgtgactccttacttaatttacccgttaaagataaagattgggtagtagttggtggtacagaaaaaatactgctagaaagaaattttcagcaagtcggaaaagattttccagttttcttacatccagaaacacatgaagagtacgctttggcaaggaaagaaagaaaatctggaaaaggatatactggatttgatactgattgtaattcagatgttactttagaagaagatttaataagacgagatttaacaatcaatgctattgctcaagatgagtacggtaattatattgacccgtttcaaggtaaaaaagatatagaatgtggtttaataagacatgtatcagaatcttttatagaagatccattgcgtgtattacgtgtagcaagatttgctgcaactttagtacatttaggatttaaaattgcagaagaaactatgttattaatgtgcattatagttaaaaaacaggaattgtcatatttaacgtcaaacagaatatggaatgaaactgaaaaagctttgaaaacccttaaccctcatgtatattttcaagttttgtatgaatgcaatgcattgcatttttttttccctgaaatgtattttttatatgaaaaaaaaaattttttaaaccgttcttttttcaaaaaattctgtaataagaatattatattaatgggtttggctgaaatatcacttttgaataaagatatcgatgttcgtttttcttatttatgtcaatttttatcagttaatcaaatagatagaaattattcaaaaatattttttgactcatatgcggcttctattattcatagtgtatgtaaacgctttaagatcccatcttatattcgagacatagcagtattaaatactggtttttatttttttttaaatacgattcattatcaatcatctaaaaatattataaatctattttcaaaagttgatgcttggagaaaacctgatcgtgtaaaaaaattagcatttttaagtaattttaattttttaagaaactttaaatctgaatttttttgtataaagtctggttgttttttagaaaaatgtttttctgttgtaaaaaatgtttctattaaattaattttaaaaaaaggttttaagggatatgaaataaaacaagaaataacgcgtctaagaattaaaaaattagaattttggcgtataaaaaatattaaacatcgtttctatctatgaaatcaatctttaattaatattttaatcaattaataaaataaatcaatccagatatgataaagcgatatattccgaagaatattagtgacgttctattgattatttttaataattttttgatacacaatatagatactataaaagagatcatgaatccaataaaaaatattggaagatctaatattttaaaattatgcatattatttataaaatcataaaatgatgctcccattattaatggaatagatattataaaagaaaattctattgcaactgatcgtttaattcctaataatattgcagttcctatagtggctccagatcttgaaaaaccaggatacaaacaaaaaatttgaaaaaacccaattattgcggattgaagcaaactaatatcattaatactacacgttttatattttttaggtttaaatatttcagatattaataaaaaaattccacctaatattaatgcatacataacattatatgtattaaatagtagttttatttttttataaaatagaagtccaaaaaatattgtaggtaaaatagcaaggagaatatgaagattttttgtatttgtttttttaacatttatgttaaattttaatattcttaaaatttttttatgaaaaaaatacaatatcgataatgcagagccgaattcaataaatatttctaatattttggtattttcgttatctatttttaaccaatgagaagcgataatcatatgtcctgtagaagatataggaagaaattctgttatcccttctattactccgataataatagaaacaataacttgatgtagatcaagcatatattttcctgttataaaataattttattttagtatatataaattaaaacggtactaaataatagcaccgtttttgtattaaaaatcaatgatacaaagttataataactgtctgtccagcagcaatagttcctgatgatttttttatttttttaaaattctctatgtttgatattacaacaggagttaaaatagactctgctttttcttttataaattctaagtctagtataataatttcatctcctatttttactttttgattatcttttgctttttttttaaaaccttctccttttaattttacggtatcaataccaaaatgtataaataattcaacattatcttctgaaatgattgaaaaagcatgcatagtttcaaatatttttccaatcgttccatttactggtgcgagtatccgattacttgaaggtttaatagctattccgtctcctacaatttttttagaaaaaacaggatctggaacatcttctatatttattatatctcctgataaaggtgcaaaaatttctgtttttttactgttaaaaaaatcagaaaagaaactcatttttttctcctaataactcttacgttatttttataatatattctgcctcttaatgattaacaaaattttctactaaattaagtatttctctgttagtaggtagtgtcaatgctttttgagctaattttttagcactagaaaaagatgttttgcgaatgatctctttaattttagggatgcttattgaactcatactaaattcatccaatcccatccctaataatagaatagtagctcgttcatcgcctgcaagttctccacacataccagtccattttccatgtgtatgcgagacgtttataacttgttgaattagttttaaaacagatggattcataggattataaagatgtgaaatcaaatcgttacctctatcaacagctaaagtatattgtgttaaatcatttgttccaatgctaaaaaaatctacttctttaattaaatattcggctattatagctgacgctggagtttctatcataattccaattttaatattcttatcaaatggtatgttattattttttaattgtatttgaagttttcgaacctctgattttaaaattctaatttcttctacggatattatcatagggaagaggatatatatttttccaaaagcagacgctctaagaatagcatttaattgtgtatgtaatatttcttttcgatccattgaaatacgtatagcacgccatccaagaaacgggttttcttcttttggtaaattcatataaggaagatctttatcccctccaatatccattgttctaataataacagatttatttttcattaattctgcaatggttttatatgcttggaattgttcgttttcatcaggtaaacagtttctgcccataaataaaaattcagttcgatatagaccaatacattcagcgccatttttttttgctgatttaatgtcttcaacatttccaatattagaaccaattttaatagcatgtccgtcagtagtaatagcttgtaaattctttaaatttattaactgatttttttttgtgagatatttcttttttattacttctgtttgattaattaatttatgagatggatttatgagaatttgattatttatagaatctaaaatgataaaatcattattttttactatctttgtaatgttcccggttcctactattgcaggaatttctaatgatcttgccataatagatgtatgtgatgttctacttcctaaatcagtaataaatcctaaaatatattttagattaatttgagcagtttcagaaggagttaagtcttttgcaattaaaattacttcattattgatattatttaaatcaataatgtttaaattaagtatattttttaataaacgattgccaatatctcttacatcgattgctctattttttaaatattcatctttcaatttttccagagcttttgcttgtccttcaataattaattcagttgctgctgcagccgacatatttttttcttttattaaagaaataacttcttgttctagctcttcatcttcaagaagcataatatgtccttcaaaaatactttcttttttttctccaaacttttcttttgtcttagtttttatttctgtgagttgttgaattgattttcttcttccttcaaaaaatctttctatttcttttgtaatatttttaatattaattattttccggttaataacaatttcatcttcttttaataaaagagctgttccaaaagctatacccggtgatgctaaaatgcctgaaatcataacattacctttaataataaagtttatctattcagagatggaaatatgacgtgtcaggcgaatcatttttcataaaataattagaagtttttttattcagctcctacgtattttgtagagaaatttaacattaatacttaagaacaatttattctaattctgtcattattagagataaatgttcaattgcctttttttcatcttctccttcagctgataatgtaataagacttccttgaataaggcctagtgtttgaattttaaataaactttttgcatttactgattttccgttataaataatagaaatttcagaagtaaatttttttgcttcttttacaaactgagcagcaggtcgagtatgcaaaccatgtggagcagtaattttaacttggttttgaaacattttttttccttagtaagagttgattaatctaatattgtaataattttaaaaaaaatttttattgtaactattaaaatacaaattatctaataaaaacaaggttttttagagtttttatattaaataaattctatttttaatagtttttttatagttcagaaaataattctgtacttaaataacgttctcctgaagaaggtaaaataacaactatttttttgtctgaaaattttttttgctgttggatttttattgctgcatataacgcagcaccagaagagattcctgctagtataccttcttttttcattaattctttagccgttaatattgcttcttcactagaaacagtaataacttgatcgattattgttaaatctaagtttttgggtataaaaccaggcccaattccttgaattttatgtggtccaggctcgattgcttttcctgctaaaaattgtgtgattacaggtgattcagaaggttcaacagctatactgattaaatttttttttctttttatttttttgatatatcttgtgataccagtaattgtgccacccgttcctacagcagaaattaaaatatctaaattgccattagtatcgttccatatttctggtccagtagtaatttgatgaatttcaggattagctggattctcaaattgttttaataaaaaatatttacttggattgcgagatataatatcatttgccttagaaatagctcccttcatgccatatcttccatcggttaaaatcaattctgcacctaaagattttaatatttttttccgctcaatagacatggtttcaggcatagttagagttaatcgataatttctagaagctgcaacataagctaatgctattcctgtattaccactagtcgcctcgattagttttacatttttatttatattattatttttttcggcgtgccatatcatattagcaccaattctacatttaacactaaaacttggatttctagattctatttttactaaaatatttccatttccaattctatttaaacgaactagaggtgtattaccaatagttaaagaattatcttgatatattttactcatttttttccttatttttaaattttttcctgtgacataataattacatcatattaaattgaatattattccagtgttatagttaaatattttttattatcttttctagtggaacttattttaaaatattgtttttaattgcaaataaaaattatataataaaaaatatcttaaactatcaatattattaatttataaaatttaaaaaaaattttaaaacttgtctattttatacgataattatatataataaattcatgacatctactaaagataaaatcgaaaaattaaggaaaattcttttaaagtatgaatatttttatcatacattaaatcaatcaattatttctgatgcagaatatgattacttatttcgtcaattgtatgaattagaactaaaaaataaagaacttattccttcagactcacctactcaaaaagtaggatcgcacatattgcagaaatttaaaaaaattaaacatttttcccctatgttatcattagaaaatacctttgatgttaatggatatttaaactttaaaaaaagaattaaaaaatccatccataataatgagccattatccttttgttgtgaattaaaattagatggagtagctattagtataatttatgaagaaggcatctttgtgcgagctgcaactcgcggtgatggttttgaaggagagaatattacatctaatgctcgaatgattgattccatccctttaaaattaaaaggaattgacatacctaaaagattagaaattcgaggtgaagtatttatgttgaaatcgaattttataaaattaaataaaaaatataaattaaatcaaaataaatatttctctaaccctcgaaatgcagcagcgggctcattgcgtcatattgatccaaatattacagctgaaagaaaattaatattttcatgtcacggatgtgatttttttgtaaaaactaacaaagagctaacaactcattatcaacgattaatgaaatgtttatcttgggggataccagttaataaagaaattgttatttgttcaagtgacatagagattatccagttttataaaaaaattgcacaaaaaagaaattttcttgattttgatatagatggtattgttattaaagttaattctttagaattgcaaaaaaaaataggatctaccacaaaatcaccgagatgggctatagcatttaaattttctcctaaagaaaggattacaacattaaatgatgtgaaatttcaagttggtagaacgggcgtgattacacctgtagcttattttaatcctgtctatatatctggagttatgattagtaaggcatcattacacaataaaaatgaaatagaaagattaaacctacattttaatgatactattactatttgtcgttccggtgatgttataccaagattattaaatgttattgagataagacgttgtgacaatgcaaaaaaaattatttttcctagtttttgtccggtatgcaatacagaattattagaaaatattgaggaaaaattaattcgctgtcattctggattaacatgtgatgcgcaaaaaaaacaagcattatatcattttttttcaaaaaaatctttatatgtagtcggtttaggaccgaaaattatcaatgaattagtagaaaagggattagttaagaatccaatagattttttttaccttaaagatattgatttaattcaattgaaaaatgttggaaaacggaaaagtataaaaattattaatagtattaaaaaatgtaaaaaaactactctgaaatgttttatttatgctttaggtatacctggtgtaggagaggtggttgcgggaaaaatagcaaattattttataaaattagataaattgatgaattctaatattttagaactaaattgtatttcaggagtaggaaaaattatctcaaataatatatttaattatttttctacaatttcaaatcgtgaaatggtggttaaattaataaaacaagccggaatttttttgaatgatcaagaaatccacaaaataaattcagaaaaaacttatttttttaataaaaaaattgttttaacaggggtttttaaatcgttttcaagaatagagttaaaaacaattttattaagtttaggtgcaaaaatttcaaataatatttctagaaaaacagattttttaatttatggcaataatttcggttcaaaattttttagagcaaaagatctagacgtcaaaattattaatcaagaggagttaaattctttaattcgtattaaagagtagtagtatattttttgggtcgtgcaggatttgaacctgcgaccaattgattaaaagtcaactgctctaccaactgagctaacgacccttttaaagagtttttcaatgatgttttatgggtgatgacggactcgaaccgccgacttcctccgtgtaaaggaggagctctaccaactgagctaatcacccttttctacacctatttatattgtaaagatagatgtgatagagtcaatctttttttaaaaaataatatttgtttggtgtaaatttaatcataatgattaaattataatctattttctgaggaatacatgaaagtaaaaactcgttttgcacctagtcccactggaaacttacatattggaagcattcgtactgctttgtattcttggttgtttgcaagacatcataatggaaagttcgtattgcgtatagaagatacggatctagtacgttctgaattaatttctatagattctatttttaatggattaaaatggttgggtctcaattgggatgaaggtccttattttcaaactaaacgattagatagatataaagaagttattaatgttatgttagaaaaagaagatgcatatatttgcgtgtgctcttgtcaagaattagaagaaatacgaaagaaacaaattgaaaaaggtaataaaccacgctatcctggtacatgtagaaatttaaatatcaagaatatatcaaatcaaaatcatgtaataaggtttaaaaatccactttttggaaaagtaaaatttcaagataaaattcgaggagaaattgtttttgataatgctgaattagatgatcttgttattcaacgttctaacggtatgcctacttataacttttgtgtcgtcgtcgacgatatggatatgaaaattactcatgttattcgtggagaggatcacattagtaatacaccccgtcaaatcaatattttgaattctttaaaagtaaaaatacctgtgtatgcacatttatcaatgattttagatgagaaaggtaataaaatttctaaaagaaaaaatgctataaatataattgaatactatgaaaatggatttttgccagaagcattattaaattatatcatacgattaggttggtcttatggcgacaaagagatatttaacctctcagaaatgaaagaattatttaatttaaaatctattactaaatcttctagtacagtaaattttaaaaaacttttatggatgaataaatattatattaataattcaccattagattatgtttctgactgccttaagaattacatggaaaagaaaaatattaatgtagaaaagggtcctgatttagaattgttagttaaattatttagaagtcgtcatcatactttaaaagaaataacagaatcttgtcgatatttttacgaagaaattaatttttttaatcatacagtcatagaaaaatattttacaagaaaaaattgttttattttacaaacatgttataagaaaattgaaaaattatctatttgggacaacaaaaatatatctaaaataatcaatgacgtatctgaattaatcaaagttacaaaaaaagaaattagtatgatattacgtatctctatgacaggagatatctgttcgcctagtataagtactgtcatacttttaattggaaaagaaaaagctttattaagaatcaataacgttgttaattatattaaaaatttataaaaatagtatttttcaatatctttatctgagacatataaaaattatttataaaaaatttgacacatatgatttttagtaagattatgtttaagtttttacaaaaaatacatttaaaaaattatttataaaaaataaattgacaggattcatgtgtttttatattgtaatattttggggctatagctcatttggtagagcgcttgcatggcatgcaagatgtcagcggttcgattccgcttagctccacgaaatttattcttttagattgaaaattttataaaaaatattttttaacgctgtgctaaatttttttttattcagcacagtaacttttataaattatatttgttgactcataatttcttgataagctgatacaattttatttcttatttgtactgctaattgcatagaaatagaagatttttctaaattgatcattacatcgtttagagaaattcctgattgatttaatatgaatttttcagaatcaatttttgcatgattttgatttttgcttatttctcctagtgctatttttatatagtctataaaattttcactgtcttttttttgtgcgtctaacaaattaaattttgtattaatattttgatgattgatattttcaataaacataatcttcctctataaaaaaaaataatttttatatgtttaaatttttcaaatactatcatatctttatcaagataaaaataatatcttcataaaagataaatatataatattaaaattaaataatattttttatatatatattcttaataagcattgaattaaaattaatttaacaggaaatttttttatttcatactattggtgtatgttgtagttttcactaaattatagttagaaataattatattagataggaagatttcatgaatttcagtactatagaagagtccgttttaaaagagaaaaaaaaatttaataattttttatctggttttttaaaaaattctcgttttttaattattttattaacagctgcagctattactgctgtttctatttcagtatggattaaatctcctgagtatcaagttttgtataatcacttatctaatgaagatcgtggatctattattaacgaattaaacgaaatgaaaattccttatcaattcactgattctgatggtccaatattagttccaaaagataaagtatatgaaattcgattgcgtttagcagaaaataatttgcctagaggcgggagtattggatttgaattattagataaagaaaaatttggaattagtcaatacaatgaacaaataaattatcatcgtgctttagaaggagaattagctcgaactataaaaaaaattaattctgtaaaaaatgccagaatacatatagcattttctaaatcatcactatttttacaggataaaaagaaatcatcagcttcaattattttagaattacaaccaggaagaaatctaaatacaggtcaaattaatgctataatgcatttaatttcaagtagtatatctgaccttccagtggaaaatattactattgtagatcaatcaggtaagttattaaatcaaacttctgtggaatatgatcaggtgaatgattcacaatttaaatatactgaagagattgaaactcgctatagaaatagaataaaaaatattttagaaccattagtgggaattgggaatatttacgctcaagttactgctcagatagattttaatgcacaagaaaaaacacaggaaaaatattcaccaaatagtgatcataaaaatcaatcaataagatcgcatcaaataattattcacaacgaaatagaaaagagcaatattcaagaagagacgcctattcctttatctaactctaataatcatgtttattttaataataatattaaaaatagtaaaaatttaaaaaataattatattcctgttgatagtaaaattaatcgtgataacacagtaaattatgaattaaatcatagtgtatcacatacaaaaatgaacataggagaaattaaaaggttatcagcagcagttatagtgaacttttctaaagataaaaatggaaaatttgtccctttaagcacacaaaaaataaaaaatattgaacatttaatacgagaagcaataggatattcgaaagctcgaggagatagtgttcatcttgttaatgcatcatttgctaaatatgatcaaaaaataccagttcatataaatcatataaatacttttagaaaatcaaattttttatataattttgcaccatggttttgttcttttgcacttctttttcttttattaaaaaagtacatatgtcctttttcaaaaaataatacgtttcaaaatacaatacctgtacaagaaaaaaaaagtatagatacacgtaatattatagaaaaaaatacttttcaagtagatcttcaaaataatactaatacagataaattaattcataaaatttgtaatatatctaatcagaatccacgtactatagcgttgattattcgtcaatggatgagtgataaaatatgattgtaaatggtactgaaaaaagtgcgttgttattaatggcaataggttctgatcaagcaggggaaatattaaaacatttaactccttttgaagtgcaagaactaattaccgctatggtaaatattaaacgagtttctgctcaaaaattaaatgaaatattactacagtgttataaccttgcaataaaaaacaatgcatttaactgtaataatagtgataaatatcttattaagatgctaactaaagcattaggagaaaaaaaaggcacgtctcttttaaaagaggctttagaaattcgaaatgctaggatttgcattaaagctcttaattatatgaaagcaaaacaagtggcttttttattagataaagagcatcctcaaattattactacaatactcatatgtctaaataaaaatcaatcagctgaagttctttcgtttcttagtgataaaaaacgtgctgaaattattttaagaattgtagattttcatggtattgaagagtctagtttagtggaattaactcaggtgattaacaatttattaaaaaataaaaaattaattttatcagaaaaaggagggataaaaactgccgctcaaattttaaattcgatgaaaataaagcatgagaaagaaattatagaaaatattagtaaatctaacgaacaattagcagataaaattattaaagaaatttttttatttgaaaatttagtagatttagatgataaatatattaaaattttacttgaaaatatcgaaaaagaaaaactacacattgcgcttcaaaatactagtcaagcaatcagagaaaagttttttaaaaacatgtctcatacagagtctaacgaactaactttaaatttagaaaaaaaatcttatatttctgatatttctataaaaaatgaacaaaaactgattttaataatgcttaaaagcattgtagaaaacggaagaatttcattaaaaaatttaagagaatattatgtctaatttaatcttagaaaaaaaatggacgaaatggtatccggaaaatatatcttttaaaaatacaaaaaaaattaaaaaaattttatgttcttctaataattttaaaaaagaagatttttttatagataaaaaaaatcaaaaagatcttacttttagcaaagaaacgtcagagataaatttaacacaaaaaaaagcatatgaaacaggtttccaaacaggacttctaaaaggcaaagaggagaacactttgttgaaaaataaattaaatgatttatttttaaattttgaaaattctcttgctaaatttgaaaatgaactatgttctcaattactaaaaacagttttaaaaatttcatcttatgtaattgggaaaaaaattgatatagataaacaaattttattaaattacataaaaaaaataattaataaagagggtgttttcttaaaaaaaccacagtttataatccatcctaaaaataaaacactaatagaagatatttttaaaaaatttttaaatagtcacaaatggactatagtttgtgacgacggtatagacttaaatggttgtaaaattaaatcagaaagtgtggatatagatgcgaccgtagatgctagatggcagcaattatgtcgtcttatttatttagaggaatattaatgaatttaagatttgctcaatttttaaaaaatatttcttcttttgaaagtagaattgagaagctatctgatattattaattatggtcgtcttgttagtattaatggattaattttagaggtggtaggattgaacacatctattggttcagaatgtttaattgaaagaacaatagatggtaaaaatgcgaatattaatgctgaagtgataggtttttcgggagaaaaaacttttttattatcttttgaagacattcatggtatttttcccggagcacgtgttttttcaaaaatagctagcaatagcaatttttttataaaaaaattgccattaggtatggaattactaggtagagtgttagatggacgaggtcaaccattagatcaattgcctaaaattgatcataagtattattctacgataaaaaattatagtattaatccattgaatagaactccaattactgaagtattagatactggaatacgcgctattaatggacttttaactattggaagaggtcaaaaaatagggattttttccagttctggtattggtaaaagcattttactcggaatgatagcacgatatacacaagctgacattattgttattgctttaataggagaacgaggtcgagaagtaaaagattttatagaaaatatattaggtttagcagggttatcacgttcagtaattatcgccgctcctgcagatgtatctcctttattaaaaataaaagcagcatcttatgctactaatattgcagaatatttttataaaaataataaacatgtattgcttattatggattcattgactcgctatgctatggcacaacgagaaatttcattgtctctaggagagctacctgtctctaaaggttatccatcttctatattttcaaaaattcctaatttaatagaaagaacgggcatatttaataaaaacaaaggatctattacttcattttacacagttttaactgaaggtgaagatgaacaagatccagtttcacatcttgctcgttctgtattagatggacatattatgttgtcgcgttattatgctgatttaggccattatcctgctattgatattgaatcttctattagtcgtgttatgcctaacattattaatgctaaacaatattctcaagctttttattttaaaaaactagttgcgtcttatcaaagaaatcgagatttaattaatataggggcttatgtgagtggcactgatgtaattttagatcatgcgattaaaatttggccaaaattagaaaaattcttacagcaagaaatctcagaaaaaagtgattatcttttttcttgtgaagcattaaataaaatatttatttaatatttaaagaaactggatatgatatgttaatgaaacataaaacattttctcttttggaaaagatagaaaaaaagaaaatagaaaaagaaacaattaagattaaaaatatttatttgcataaaaaaaagcatatcaaacaattaaaactacttagtggttatcaacaagaatatttaagaaaaatacatgataaattaatattaggtgtgtcggtacatcaatggcaaaactataatagttttatttctgtattagaagtaattattcaagataatataaatacaatcaaaaaagacgagaaaataattcaagaaagttttaaaatatggtcgaaaaatcaaattcaaggtaatatttggaaacatttaaatatgatacataaaaggaaaatattaagaataaaaaaaataaaggacgcaattatcaatgatagtcatattcaattaaaattttttaaaaaggtgtagtcattgtaatgatagaaataattagcaatataacatcgcaagataacgtttcgactaataaaaataatagtttctttaatattattaattcatcatatttattaaaatctacttttagtagatttaatcaatattttctaaataaaaaaatagaatttgatcatattattgcagaagaaaaaaaagagaacaaggataaaattgttatttcctctcattttatagttaattatttattaaatattttaaatcaaaaaaatacagattttaattccaaaaactttaataattctaaaaatgatcaaataaaaaaaaaaaaaatagataacaaccaggttaatttataaaaaacggggcatttttttagaaacacaaaaaataccacagaaaaaaaatttttaagagaactatttaaacataaaaataatttcaataaaattcatgaatcaagtaatattaaaaaaaaaaatgatttcgactttaaaaatctaaaaaataaaacacttcaaaaaaaaataaatgtttttgacaccattaaaaatcacataaaaattataaataacgaagaaaaaattattttgccattaaatattaaaaaaaataaaaagattgtatttgattctaaaaatatcaataaaatcaatcccatgatcagtaaaagacattcatgtaaaattctttctaataaaaaggaatttataaaatcatatatagaaccatttatgtcgagcgacacaaaaaattctattgaatggaaaaaattaattagtcataaaatacttttatcaatttctaataagtacaatcaagctaagatacatttgaaaccggaatcgctagggtctatatatgtatcaattagcatgaaaaataatattgccacattaaaatttatttctgaacataatgaagtcaaaacatttttagacagttatatgccttttttgtataattcattaaagaaaaatggaattaaattaaaagaatttaagatttctatttcttcaaaaaaaaaccagttaaaaaattataaaaacttattttataaaaatatttattacacagatcatatcaagaaaacattaaattggaatgaaaaaaaaatagactatataaaagataaaacaattgatgtatatgtttaataaataatataaaatatttattcaaaaaataatgatactattcgatataaaaaatcaagcgtgttagcttgtcttttaataacttttacctgtgaggcatgtaaaatgggggaaagtaagaatctacatgatgaaattaaaatattagaaaagattaatcgtcatttttcagatgaatttacaaaatttttttctaatttccttaaaaatagcgtggaattagtttcctgtagtataaaaataggatcttgcacttctaataaagaaattataaccaacctaagatgtcttaatttaatagaaatattaccttataaaaaaaaatcttttataatttttccctataattttttgtctaatattatagatattttatttggaggccagggtgattttaaagatcatactaaaaaaataagagatattacttctactgagtctttagttaataaaaaaataatgaaatttataacaaatgctttttctgaaatttacaagaagtattttgtaaaagaaataaattttttcaatacaaaaacattttttgattttaaaaaatataactttgatcttaacaaattatttttaattaattgttttaattttaaaattaataatacagaaattttttttaattttttaattcccaaatcaatactaaaatatcaaaatgagaaaaaatttttttctacatatgatagtcataaaaatacatgtatagaaaaaaatattgagaataaagtatctttaaatgatatatacaatgttgaagtaaatattatatctaaaataattggtatttctgtttcgtatgataagatttataatttatcaataggagatgttttatcaattaaaaaacctaataaaattacaggatttatccaagatcaagctatatttcttggtaattataagaggtttaatgaacagtctattatttttatagaagagtttattgactctagttcagagtctaatcaagataaggaatactctaatgagtaagatacagaaaaactctgataatgacaaattaattgattctgaaaaaaaaatacctacagatcaagatgttgacaaaaatttattaccccaagaaaattcaaaaaatagtacattagataatactattgatatagtagacagcaaaaaaacaatacttaatgtacctgttaatattactgtagaattaggaacatcaagaataaaaataaaagattttcttaaattttcaaaaggaagcatgttaattttaaatgaatcaattaaagaaccattaaatatttttatgaatggtcatttaattgcatctggagaaattgtagttttagaagaaaaatacggaatacgtattactaatataaaaaattccttaaaaactataaatatttcatcttaaataaaaattttatgaaaaataatttgttttttcaatcaatatcaaattctcttcatccaatatttaacagtgaaaaatttttacaaataatgagttcattgtctgaaataatattgctaatattaatttttagttggatcttaaaaaagatttcttcttttaaaattaacaagataatatctcgtatgaaaattatagaaagattgtctgttggatctcaagaatctattattcttgtagaagttaaacaattaagattattattaggtgtgacaaaaaaaaatattagtcatttgcatacgtttccgtctaattcaaaagatgaactaattaaagaaacaaatgatactttgttgcaaaaaaatctttttgatcgttctttgaaaaatttttctaaaacatcctggaaaaaaacaatgttttatagaattattccatttgtatttttattgtcactttgcccttccgcgcatgcagatatgcctggtttaacaagtcatattttagatgatggcagtcaaacttggtctgtaccagtgcaaacattagtttttttgacatctctgacttttcttccagcatttcttttgatgatgaccagctttacaaggatcgtgattgtttttggtctattacgaaatgcattgggaactccatatgcaccaccaaatcaaatattacttggtttagctctttttttaacttttttcataatgtctcctacatttgaaaaaatctataaagatgcttatgtaccatttagtcaagaaaaaatgaatatggaagacgctattttaaaaggttcaatgccattaaagaaattcatgttaaatcaaatacgtacacctgatttagaattgttttcaaaattagcccatatttcttcttataaaaataaaaatgatataccaatgcgaattttattgccttcatttattacaagtgaattaaaaacagcttttcaaattggatttactatttttataccttttttaattattgatttggttgtagctagtgtattaatggctcttggtatgatgatggtaccaccttcaacaatttccttgccttttaaattaatgttgtttgttctagtagacggatggcaactattaattacttcattagcacatagttttaatacataatatttttataaaatattttttgtttattacaaataattttaaatcaactttaaaaatggagatgtttatttatgacatccgaatatgtaatggaattattttataatgctatgaaagttgccttgattattgcatcaccattattattggcagctttaattagtggtttaattatcagtatattacaagcagctacacaagtgaatgaacaaactttatcttttatacctaaaattatttctgttttaggcgtaatatcaatacttggaccttggatgttaggtgttatgctggattatatgcataatttatttaataacataatattgattatcaaataatgttaacatttaacagtttacaattgataactttaattagtaattttttttggcctatgataagagttttatcttttttttctgttgcacctatttttaaggaaaaactgataaataggaagagcaaaattcttttgtctggtatgattagttggttagtatggccctttttgcctgaagttcatacagtattattttcatactttggatttttattgattttacaacaaatattaattggtattgttttgggttttactgcacaattattgtttgctacaataaatttatccggtgaaataataggcttacaaatgggtctatcatttgcaaccttttttaataataatagtcaaattggcacctctataatatctcgttttttgaatattttagctttgtttgtatttataactcttaatatgcatctttatttaatttcgatagtaattgatagtttttatagtatgcctattgatggttattttttaaatgtaaatattttttttattttattaaaattttctagttctatttttttaaacggtcttttattagttttaccaattatgattattttattatctattagttttgtaatgagcttattaaatcgtttatctcctcagatatctattttttccattggttttcctttaaatttaatattagggatgttaatgttatattttttaatacctgttatgctgccttttttaaaaaaaattttagatgatttgatattttttatgaataataatcttttacatatatagttttaattttttctatataatttaaaaatatacttgtttcatatgaatgtatatcttatgaattttaatatttaaaaaatttctacaaataaagtataattttttaaaaaaattatactttaatttttagtgtaaaaaaatagattatttttttatttaatttttccttcattatataagatgtgtttacgaattacaggatcatatttttttaattttaatttatctggtgtgtttcttttatttttagtcgtggtgtaatagtgtccagttcctgcagaagatatcatttttattttttcacgagattttttagccattgattcacctttattttttcatatttatttttcttattactgtttcaattccttttttatcaatataacgcataccattggtcgaaacatgtaacttaataaatcttttttcatcagcaatccaaaatcgatggtattgaatgtttattaaaaattttcttttggtggcatttaaagcgtgagaacgattattgccaatcattctttttttacctgtgatctgacatatacgtgacatgaggtgttctctcaaattaatatttgatattattttaaattaaaaaacattataatttttactttttataaagtagagaacaatattttaacatattataaaaaactataatagttgtttaatttttcacgtgttttatgaagtgaatataatatgttataaaattaaaatgagttctaatataatagaaatatattataaaaacatgcaaaaaaatagttttcaagtagaaaaatatcgtcttttttttatttttaatataaaatatatgatgttaactattagttaatttattataaattaatttttatatttataatttaatactaaatcaggacaatttttatgagtatatatcggagatatatatctaaatctgtaatttttttttctgttttctttgttatattttttttatttatagaaagcagtgttggttttaaatatatttttaattttacgaatcgtatttttataggattgaaagcagaagaaatatcaggaaattggcgtgattttacattaaaaaatattaaatatgatgtttttggaatctccataacagctaatagtttacatatagtattagacactagatctttatttaaaatgtcaacaattttcaaaaagattgagacaaaaaatgtaatactttcattaaaaaaaaataccgcttctaatttttcacaaaacagcctaccctctaagatttcaaaaaacattttttttataaaatatccgattattttaaaaaaaatacatgcagataaaattctttttacatcacctaaagtacgtgtatcttttttagatgttttaagtggcataaaattggttagaaataatattattttttcacctacttatataaatactattcatgtatcgtctgcaaaatttaattttgaaaaaaaaaatattttaaataaatcaactattattaaaaattttaataaaattaaaaaaatatatagtttttcgtatttttcttcaaatcaaacaaaaaaaaattttccattaaatatttatttgaagtctttaaaatgcaataaaacacaatttatagattatgaatataagaatctattgcaagtagagttacaagctaatatagaaaataatattttacaaataaataaaatgaaagtagattcttcctttttaaagatgaattcttatggaaaagttatttttaataatgattattctatttcatgtgtgatgaatagtaaaacagtaataccaagcttgtataataaaagtataaattttcaacttaaagccaattttaacgtagatcatcaattaatatttaaattaatctctaaagatttatataatatgaaaattaatggtttagtatttttaaatttttcagattatccattttttataaaattacagagtcgtaatttatcttgtgtaattaaaaaaaattatatatttaaattaaaaagttttgatggtgttttaaaaggatatattaataattattttttttctttaaaaaatatttttactttacaagatttgcctccaattttcattgatattcaagggagaggtgatttaaataatatttttttaaaaaaaattaatttttttccgatcaaacaaaaaaaattttataaaaaagtaattcatccagaagattatataaaatacaatcaatatatattaaaattaataggacaaattaacatcacaggaaaatctgatagacatacacattatgtacatatccctaaaatagatttatatgctaatataatgaaaaaaaaattatctatattaggcgctttatattataaaaattttaattttatagaaactcctgggataaatttacttttaggaaaaaataaactgtatttaagaggttcattaggaaaaaaatataatatttattcatctatttatgcgaataatttagattatttttttcctaaattacaaggtagaatgcaagctaaagtgaattttctaggaaataataaatttcctattatatctagcaaaattttagctcgagacttaaattggaacaacatatattttaagaatattaaagtacttacgggaataaatattaataatacattttcaggaaaaatgttaatatatgcaaataaaattcatttttataaattttatattaatactttacatattcaaacttattcgaataatcataaacaaaatttttcttttttattaaaaagtaatcgattacatataaatttaataataaatggagcttttaataataagacaggacattggcatggtttttttaaaaaaataaatattcgtactttttgggggcaagttactgcaaaaaaaaataattttattcattattatgattctcataacagtatcactaatttttatcaaaaaagtatcaaaaaaaggaattgtttttcatcttttttatacaatgtaaagatgtctttttttaatttatttaatagatccttcattagttttgaaagtaaattatctattaatgcaaaattaaaattaatattaggaaaaatgatttctgatggtgcaatttttttaaaaggcaataatacgaaattagaaaaaaaaattaataaaaaaatttttattcaaaatatagatttttttaaaatatctatgaatttaataaaaaatgattttaaaagtaaatggataataaaaaaaaataaaaaattatcgaataataaaaatatttttgggtatttaaacattatagacatttacaacaaaaaaaacataaaaggtgaatttatcttttataaatttcctttttcttttataaatttttttactacaaattttaaagaagttagtggtaagtttcaaagtaaaataaaattatttggaactttatatcagcctaaagttttggccgatgtacattttaaaaatatttttattagaagtaacaacatattaaagtatataactttattttttccttattttttaggaaaagtagataatataaagattaatcaagaaataatgatgaataaaggaaatatattatttacattaaaaccatttttcaaaaataactctgctgatatagaatggaatattgcatttaatagcaaaaaaatatcagtattaatttttccaaaaataaaggtaaaattttcttcgaaattaaatttgcattatttattttcaaaatatgacttaattggatatataaaattttccttattttactttcaaattaacgaaaaaaattttattttttaatgttatcaaaaaatatcacttatttaaaaagatactattttttttagcacggttatatgcatcattaatttctaattttgcatcttgacagtttccccatccaataatttccacccatttttctttttctaatgttttataattctgaaaaaaatgagtaatttgcttttttaacaattctgatatatctgatatatcatttatgtttttatattcttggcaaattttacttttgggtactgctattattttagcatcatcacctgattcatcttgcatatttaatatcccaataggtttacaatgaatgacacagctagactttattgggtaatgagaaggtactaaaacatctaagggatcaccatctaaagataaagtatgattaatataaccatagttacagggatagaacattggagtaggtataaaacgatcgacaaaaagcattcctgattttttatctacctcatatttaataggggatgaatttgatgaaatttctataataacatatatatcatttggtatatcatcaccagcaacaattttatttaaattcattttttttccttattaatactttgtgattattttatataattttaagataagtagatgagtttatagttttaaataaattttaacatcgaagaataattatatctacgttttgtacaaagtaatgtgttttaattttgaatgttttttaatataatatttatatacaaaaaacatgttgtaaggatttatatatatgcaattaattaaagaaatagaaaacgaagaattacatcttgtgaatacagtaaaaaacactcttaaactatctaaaaatattaatgcctctgtagaagtatttataaaaaaaacaataggtattagtgttaatgtaagaaataatgttgttgaaaatgtagagtttaatagcgatggtggattgtttataacagtatataataagttctctaaaggtagtgtttcatctaaagattttagtattaagaacattaaaaatatgttagacatagctattaatatttcaaaatattcttcttctgattttttctcaggtttgccggacataaaatttttatgctttcattctatggaacttgatttgtttcatccgtgggaatttaacatagaaaatgccattaagatgtctatattatcagaaaaatcagcttttgaatctgataaaaggattgttaatagtgaaggaagttttttaaatagtcatacaactataaatgtttttggaaacagtctaggtgtgttagaaaaatataaatctactcgttattctaattatacttgtatgatcgctaaagataaaaattctatgcaaagagattttgattattctctttcaagaagaattgatgatttaataaaaccagaaattttaggtcaaaaaacagctaaacgagctatatctagattaggttctcgaaaaatacaaactatgagatctccaattattttttcatcagaaatatctcacatgtttttttcacatcttgctagtgcgattagcggtgataatgtttatcaaaaatctacatttttaattaatgatctgaaaatgaaaatctttcccgattggcttgatattgaagaaaatccacatttaaaacgaggtttgggtagtaaaccttttgataatgaaggtgtagctacagaaattaaatatattattaaagctggaatcttacaaacttggttattaaattgctacaatgctcgtaaacttaaattagacagtacaggaaattgtggtggaattcacaattggttagtttcgaatcaaaatatatcttttgaagaacttttaaaaaagatggatcaaggtatattagtaacagaattaatgggacaaggtgtagatattataaatggtaattattcacgtggagcagtaggtttttgggttgaaaaaggaaaaatttcttatcctattaatgaaattactatatctggaaatttaagaaatatgtggaataatatcgtgagtattagcagtgatgttgatagacgtaataatattcaatgtggttcggtattattatctgaaattcaggtttctggaaattaacttatattgtttaattttaaataatgaactaaaggtaataaatttattacctttataaaaatatttctagttattgaagttgactcgtgtaagccgggttctgttttaacagtcattcatctagattagcaatcacttactaattcaagcagcctacccaggtttaagaagtacgagcagtacaaaaaatttatcctatatttggctttgctccgggtggagtttaccatgccatgaattgttaccaattatgcggtgtgctcttaccacgccttttcaccctggccatatttttatatattacaaaataggtggtttattttctgttgcactagtcataagctcacgctttccagatgttatctggcaccctgctctatggagcccggactttcctctttttaatttttaaaaactaaacagcgactgtttttagtcaacttcaaaatcaaattatacattattttaataattttgtcactcttctttttttattacatattgatataatttatttttattaatatcatgtatttgtgcagtaattaaaactgatgtttttaatgaaaaaaactttcttaatattgaaaatgtatctaatattttttttgatagagtataattttttaattttttaaaaccatcaatgataattaccatttctcctttataacgatatttattttctttaagccattcaagtattaaacttgcttttgcaccataaatagattcccatttttttgtcatttctcttgctattactatatgtcgatttttatctatttgttctattatatcttttatactttcaagtatcctgtgttttgattcataaaaaataattgttcgtgtttcttcttttaaagaatgtagtaaatcacatcttgatttttttctagaaggcaaaaagccttcgtagcaaaaacgattatttattattccagaagcgcttaatgccgtgatagcagcacaagcacctggaagaggaattacttttatatcaaaaatatgacattgttttattaatatacaaccaggatcattaataatcggtgtgcctgcattagaaactaaagcaatttttttcccttttttcagttcttggatcaaattatgactttgttttttttcattatctttgttcattaatattaaattatttttaatattaaaatgttgaagtaaaatattagtgtgtctgatgttttcagcggcgattatatcaacatcttttaacacttctaatgctctataagtaatatctgatagattaccgataggagtaggtacaatataaagaataccaatataaaattcattcattttttttccataaaatattattatatatgtgataatagttaagattaatcaaacattttatttaaatataaaatttttttatttttttattctaattttaattgaatatataagtttttgtaaatgtaaggacaaaaagtgagacgagtagttataacaggcattgggattgtttctagcattggtaataataaaaaagaagtactagcttctttatataaaggtgtttctggtattgtttcttcagaagaaatgaaaaaattaggcatgcgtagtgcagtttggggtaatattaaattagaaagtataaacataataacacaaaaattatctcgctttatgaataatgcttctagatattcttttgttgctatgatggaagctattaaagatgctaagatagatagagaatattatcaaaaaaatcctcgtgttggactaatttctggatcaggatgtagtttttcaaaaaatactttaacatctgatattcatctcatgaaaaataaacatatttcaaaaggcatcagtccgtatcttgcagttaaaacgatgccttctggaatatcagcttgcttatctactctgtttaaaatttatggggtcacttattctataagttccgcttgcgcaacctctgcacattgtatcggaaacgcatttgaattaattcaattcggtaggcaagatcttatttttgcaggtggaggagaggaaataagtttagaactagcaatgcaatttgatgcaatgagagctttgtctacgtgttttaataatgaccccaaaaaagcatcacgtgtctatgatgtatatcgtgatggttttgttatttcaggtggagcaggtatgctagtaattgaggaattgaattcagctttatctcgttctgcttatatttatgcagaaattattggatatgcagccacatctgatggttcaaatatagttgtaccttcaggagatggagcaattcgttgtatgaatttagctagaaaaggtaaaaatattcctattgattatcttaatgtacatggtactggaacaaaaattggtgatttaatagaattagaagcaattagaaaagtattcttaaatgaaaaaaaaccaatgatttctgcaacaaagtcaatgactggccatggattaggagcttcaggagtacatgaaatgatttatacactattaatgttaaaatataattttatagctcctacaatcaatatagaaaatttagaaccttgtgcggaaaatatgaatattattcaaaaaactacaaatatagaaattaatacagctatgtctaatagttttggtttcggtggaactaacgtgtcactaatagtaaaaaaatattaatatactatcaataattgaaatattttttaaaaatctttttctatttaaaaaacatattttttatatatctgactagtattttttaaaaaaatcattttaatatttttttgatattaaaatgattttttattcttaatatatattattcagtttatataaaataaaaaatatatttatgaaatctaatttatttattttttgatttaaatttttttattgaaaaacaagagagattaaatatgaatcaattgagtgctttgaaacaattttctattattgttgcagatactagtgatataaaatctatttgtaaataccaaccagaagatgccactaccaacccatctttaatactacaagcagtaagttctaatactaatcaaaattttgtagatcaagctgtgcaatatgcaaaaaagaaaggagggctatataaagatcagatcatcaatgcaagtgataaaatattagtagatttaggaatagaaattctaaaaaaaataccaggttatatttcaagcgaagtagatgctcgtttatcttttagtacagaggcgtctattttaaaagcaaaaaaaataattgatttatatgaagaacaagggatttctaggaatagagtcttaattaaattagctgctacatgggaatgtataaaggctgcagaagaacttaaaaaagatagtattctttgtaatttaactcttttattttcctttgctcaagcgcgtgcttgcgcggaatcaaatgtgtttttaatatctccttttgtcggacgtatttatgattggtatatttcacaaaatttactatctaaatcttttttaggaaaagatcctggtgtaatatctgtttgtaaaatatatgaatattataaaaagtatggctataaaacgattatcatgggggctagcttccgtaacattcaacaaatattatatttatctggatgtgatcggttaactatttcacctgttttattaaaagaactcgaatctaatactgcaaaaattgatagaaatcttgctcctcctagttttatttcagtccctccagtagcactttctgaagaagagtttcgatgggaacataatcaagatgctatggcggttcaaaaattatctgacggcatacgaaattttggaaaagatcaattacgtttagagaaaatattttctaaaaaaatataaataatataaaaaaataaagtttgactaatatttttaaattgataaggaaaatctatgtattcacgaaaagaattagctaatgcaattcgtatgttaagtatagatgctgtacaaaatgcacaatcaggacatcctggtatgccgatgggaatggcagatattgctgaagtgttatggagaagttttttaaaacataatccagcaaatcctaattggaatgatcgcgatcgttttatattatctaacggacatggttctatgttgctctatagtttgttgcatcttacaggctataatctaccgatcgaagaattaaaaaaatttagacaactgaattcaaaaactccaggacatcctgaaacaggtgaaacacctggtgtagaaacaactactggtccattgggacaagggttagcaaatgctgttggtatggctattgcagaaagaactttaagttcttattttaatcgaccaggatatgatataattaatcattatacttgggtttttgtaggcgacggttgcttaatggagggtatttctcacgaagtctgttctttagcaggaactttaaatcttggaaaattaatcgttttttatgataaaaatggtatttcgatagatgggaaaacagctcactggttcaccgatgatacagcaaaacgttttgaatcttataattggcatgtattagataatatagatggtcatgattcagaatctatagaaagaagtataaaacaagcaaaattaataacaaatcaaccttctattattatttgcaatactattattggttttggttctcctaataaatcaggaacagcagaatcacatggagctcctctaggtgaggttgaaatttctttaattcgagaacaattgaaatggaattatcctccttttcagatacctaaagaaatttataaaaaatggaattttatagaagaaggatctaaacttgaaaagaaatggaacgaaaaattttctttatatcaatccaaatatcctgatttatcgactgaatatttgcggcgaataaataaaaaattacctgttgagtgggatagagtaactaataattacatttcttttttacaaaaaaatagacaaagtattgctagtcgtaaagcttctcaaaatacattagaaaaatatgcgatgattttacctgagttaatcggtggttcagcagatttatcaccgagcaatctcactatgtggtctagatgtaattccattaaagataatttatctggaaactatattcattatggagtacgtgaatttggaatgaccgctattgcaaatggcatatctcatcatggaggttttataccttatactgctacatttttaatgtttgtcgaatatgcacgaaatgcagttcgtatggctgctttaatgtgtaccaaacatatttttgtgtatactcacgattctattggactgggtgaagatggtcctacacatcaaccagtagaacaattatctagtttgagaataactcctaatatagatgtatggagacctagtgaccaagtagaaacagctgttgcttggaaaaaagctattgaaaaaacatcaggacctacagcattaattttatcacgtcaaaatcttgatcaatttgagagaagttctgaacaattagaaaacatttcttatggagcatatatattatatgattcaaaaaaaagacttgatattatctttatatcaactggatcagaattaaatgttactttaattgctgcaaaaaaattggcttctttagggtattctgtacgtgttgtatctatgccctgtactagtgtttttgatagacaagatgcttcttataaagaatttgtattaccgacttatgttgctaaaagggttgctgttgaagctagtatagaagatttttggtataaatacgtagggataaatggtgtaattattggaatgaaaacatttggtgaatctgctccagcagaagatttatttaaaaaatttggttttactgtacaaaatatcttcaataaatcattaattttattaaaatcttaatttatttaaaaattttaaatatttatggggctcaattatagccccatcttttatgaaaaataaaaataatatttatcaatagaaatattaaattaggaaaaaatatgacttgttctattactgaattagcaaaaaaactaatttctattccttctgttagtccaaaagatttaggttgtcaagatattataataaaacgtttatgtgcaataggatttgacattaaaagagtaaatgttaatgatacaaaaaatttttgggcttttagaggtacaggtaaaacattaacatttgcaggacatacagatgtagttccaataggtcaagataaagattggcaaactgatccttttcaaccagtcatacgaagtggatatttatttggcagaggttctgctgatatgaagggtgctttagcagcaatgattactgcggctgaaagatttgtaaataagtttccaaatcataaaggacgtttgtcttttcttattacttcagacgaagagtctagtgcagttgatggaacaattaaaatagtagaatatttaatgtctaaaagggatatgattgattattgtatagtaggagaaccctctagtactaatatagtgggtgatgttataaaaaatggtcgacgtggttcaattacagctaatataactatttatggaatacaggggcatattgcatatcctgatttagcagataatccaatacataaagggttacctgttattttaaaaatattgtctataaaattagattctggaaatgacttttttttacctagcagcataaatattgcaaatattcatgcaggaaatggatttaataatgtgattccaggatctctatttgttcaatttaatattagatttagttccgaagtttctgaaaaacacattcaatctcaaatagtaaatatattaaattcaaatgatattaattattctatagaatggttattttcaggaaaaccatttatcactaaaaaaggtttattgatagacacagtgatacaatctattttttattttaacaaaaaaaagcctattttatctacttctggtggcacttctgacggtcgatttattgctttaatgggttctgaagtagtagagttaggattagtcaataatacaattcataaagttaatgaatgtgtcaaaatatctgatttaaaattattaagctgtatgtatgaagatattatgaaaaatttattatcttaatttttcaacaaaaatatttataaaaaaacattttttatattttttataaatgatgcagaatatcatagagatagtctgcaccaattattacgcatgaatatttagtataaaaaatattttcttaaatattattattatttttaatatattatatattttataccggtggaaatatatcataattttcttttttgagatctttatcttgatagggaatgctatattcttctttttttttagggctgctaattcctttcggaataatcaatctacgaaattgtttttttattttatcaaaacgataattttctttagaatcatttaatgtacaagatgttattaaaaatatatttaatatttgagatattattataattttgaaaaattttctatgatattttgagattagcatattgaattgctttttcaagttgaaaacgtgtagaatctaaaacgggtgtcataggcaaacgaagtgtatcactttttattaatcctattttttttgctaaccattttacgggaataggattgggttctatgaacagcgcttcatgtagtaacattaggcgtttatttatagatcttgcatttataaaatccccttttaatgcatacgaacaaatttccatcatttcttttgcagcaatatttgctgtaaccgatattacaccttgtccgcctaattgcataaaatctaaagctgttgcatcatctccactgattaataaaaaattagttttaactaattcttttattttatggattcttgataaatctccagttgcttctttaattcctattatgttgttaaaatgagataatttggcaactgtttctgggagtaaatcacatccggtacgactgggtacattatataaaatttgtggtaattcagtgttttctgaaatagctttaaaatgttgatacaatccttcttgtgtaggtctattataatatggcgttacacttaaacaacctgcaacaccagatttttcaaatcttttggttaaagatatagcttctgttgtagcatttgctcctgtacctgcaataactggaatacgtccatctgctaattctaaagtgagcataacaatatttatgtgttcttcttgactaagtgttgcggattctccagtagttccaattgaaacaattgcttcagttttactagcaacatgataattaattaacttttctaaactaatacgacaaatctgacctttttcatccatgggtgtaattagtgcaacaatacttcctttgaacattagttgtcctcctccataaaaaatattttatgggatgtttggcacgttttaaaaattaagtatatagaaattattaatataatatcttaaaaatataattttattgacaaataaatatataaatattagataatattgtacatataatagagttttaattatctaattcaatgaaaaattttttataataataacttatatttaatattttttatttttttaaatgaaatacaattaatttgaacaatatattttatagagaaacaaaggtagaaaatatatatttattattaacatttcgctttataagtatgattgtacgtaacatctttataaaagtatttatttttacagaagaaaaattttgcaatttttattgcattatttttcaaatatatttttttatatacttcaaaagtatttttaaaatttaattatagtacttagcataattaaattatgcgctatttctagaaaaatataattctattcatgtgaaaaatatcaatgatatttaatatgatcatcctatcgaataaatagttatttagcattatgaatatattttaaaggaattattttccactgcattgtgcgcgaaatcttaataaatgatccattaatacaattgctaccattgcttcagtgattggaacagcgcgtaaacctacacatggatcatgtcgtcctttagtaactatttgaactttttcgttatttttatttattgtattgcctgcttttcgaatacttgatgtaggtttaaatgctacttttagtacaatttctcgaccattactaataccacctagaataccaccagaatgattagttaaaaatccttgtggcgtaatttcatcacgatgttcacttcctcgttgatttattactgaaaaaccgtctccaatttctactccttttgcggcattaatactcatcaaggcgtgtgataaatcagcatcaagacgatcaaaaactggttctccaagtcctacagggatattttcagcaataattgttatttcagcaccaatcgaatcacctatttttttgagatatttaattaaattttctagtgctaaaattttttcaggatcagaacagaaaaaaggattattttcgacttcttgccaagatttaaaagggcatttgatattgcccattgctgacaaatatgctcgaatagttatcccatatttctcattaaggtatttttttgctatagctcctgctgcaactctcatagcagtttcgcgagcagaagatctacctcccccgcgataatctctaattccatattttttttcataagtataatcggcatgtcccggtcgaaataaattctttatatcgctatagtcttgagacctatgatcatgattataaattattaaaccaatactagtaccagttgtgaccccgttaaatataccggaaagtatattaacttcatcaggttcacggcgcaaagtcgtgtaacgggaagtacctggtcttctacgattcaaatcatattgcaaatctttacaagataattcaagaccaggaggtgttccgtcaattatgcaccctaatgcttctccgtgtgactcgccaaaagtggttacacagaatattttcccaattgtatttccagacattttttatccttctgcaattgttaaaatgaaataatacaactatacagaacaaataaacaaaatgattttttattttttaaaatatttaaattgtatttattttttaaaaaatcatctgtttaaactaattgtttctttttttatgtagttttataataatatttttttatttgttgtttttacaaaaactaaattatataattaatgaaaaatacataattcattataaatattttaaattaaatacatatgtttggaatttttaattaattaacattattggtaacaaacaactatggataaaaatagccgatataccgttgattcgagtattttatttcgtcaatggttaaatgatactcgtgaaatggtacaagatactatttttcattctcgaattcaaaaaaaaaataataatcatccagtatctcaacgcgtttttttcgaacaaaatgctcatagtcattatttttcttatagaaataataaaaatttatttaaagaaaatcctgtttcttatattcgtcatcaaagcttgtataatgttttaaaaaatctaaaaaaaggaagatacaatccagatatttctattgatttgcatggattaacacaacatcaggcacaacaggctttaggagaattaatcacgacatgtcaaaaagaaaaaattttttgtgctcatataatgcatggtcatggtaaacatattttaaaaaaacaaactccgttttggttgtctcaacaccctgatataatagcctttcatgaagctcctaaattttttggaagcgatgctgcaattatagttataattgaaattaattctctaaaaaaaaatataaatatttttaattagaaaatcaaataattttatatcaagacattaaaatagaaatattgctttctgaattaaactaaaacagtgctattttatttaatataaaaagtttctttaattattttttttaaactacaatgttatcaataattttaatttattatacttcatttttgcaataacattgtctatgtcataaaatgatttaattataattttttcatgagcactaataagatattttttttaaaacccttattttttgggtttttttattttctaaaaaagtaaatttatataagtttttttatgtaataaaaagaactttaagggattcgaaatatgtttgaaaataatcgtgtacgtatagcgatgcaaaaaactggccgtttaagtaaagattctatcagactactgacatcttgtggtgttaaaattaatttaaaacaacaaaaattaatagcatttgctgaaaatatgcccattgatgtaatgttagttcgtgacgatgatattcctggattggtaatggatggtgtagtagatttaggaatagttggagaaaatgtgcttgaagaagagttattgaaacgaaaatcacaaaaatctgaatgttcttatattactttaagacgactagattttggagtatgtagattatctttagctttaccggtaaatactatatacactaatataacatgtttaaaaaatattagaatagctacctcatatcctcatttattaaaaaaatatttagacgaaaaaaatatttcttttaaatcctgcatgttaaatggatcggtagaagttgcacctagagctggtttagcagatgctatttgtgatttagtgtctacaggagcaacattagaagctaatggtttacgtgaagtgcaagtagtttatcattctcatgcctgtcttatttgtaagactggaaatattaattctataaaaaaagaatttattaataaattgatgactcgtattaaaggcgtgattaaagctcgcgaatctaaatatattatgttacatgctcctataaaacaattagaagcggtgatatctttacttcatggagcagaaagaccaaccattttaaaattagcaggtgatgataatcgagtagcaatgcatatggttagtagtgagacattattttgggaaacgatggaaaagctaaaattattaggcgctagttcaattttagttttaccaattgaaaaaatgatggagtaagaaatgcaatgaaatattttaaaaatataattttttggaacaaactacaccctgatgaacaaaaaaaaatattatcaagacctattttaaaagaaaataacttcattaaaaagactgtaaaagaaattatagaaaatgttagattatttggaaattcagcattaaaaaaatatacttttttatttgataaacaagatataaatacatttcaagtttcaaaagaaaaaatctcttcatcttcgttttatttaagtaaggttctaaaagattccatttctgtcgcgcaaaaaaatattacatgttttcataaagctcaaattccatctaaaatagatgttgaaacagaagttggagtccgttgtgagcaaatctatttacctctaaattctataggaatttatattcctggcggaacagctcctttattttcgactgtattaatgttagcgatacctgctaaaatttctggttgtaaaaaaattattctttgctctcctcctccgattagtaacgaggttctttatgctgctcatatttgtggaattcatgatatttatcaagttgggggagctcaggctatagctgcactcgctttaggtactgaaacggtccctaaagtagataagatttttggaccaggcaatgcgtatgttacagaagcaaaattacaagttagttcaatttttaatggaacagaaatagacatgttagcaggaccttcagaattattaatcattgctgacaacactgctaatccagattttattgccgctgatttattatcacaagctgaacatggtgtttcttctcaagtaattttgcttacaccatgttttgaattagcagaaaaggtagtgctttccattaataaacaactgaataatttatctagattatcagaaattttgaaaacattaaaaaacagtagtgtcataattgtcaaaaatttatcagaatgtattgaaatctctaatatgtatgcacctgaacatctaattattcaaacacaatcacctagagaagtacttaactacatctctaatgctagttctatttttcttggtttatggtctcctgaatctgccggagattatgcgtctgggacaaatcatgttttaccaacatatggaaaatctattacaaattcgtctttaggattgtgtgattttcaaaaacgtgtattagttcaagaattaacagctaaaggactaatgaaattatctaatactattgaaattttatcttccgcagaaaaacttcaagcacataaaaatgctgtaaaaattcgcgtagattttttaaagggaaaaatatgacagataatgttttgaaattgtctagaaaaaatataaaaaaactaataccttatcaatccgcaagacgtatcggaggggaacatgggaatatattattaaatgctaatgaatcgcctgtatctattttttttaaattaaaaaaaaaaccatttaatcgttatccagaatgtcaacccagtaaactaatatcttcttatgctcattatgttaatttatcttgtaatcaaattttagccacaagaggtgctgatgaaggaattgaattattaattaaggctttttgcgaacctggtaaagatgctattatttattgccctcctacttatgatatgtatcgaataaatgcaaccatagctggtgtagaaataaaagaaattcctactattaaaaatacttggcaattagatttgttaaatattaagttaaacttaagtagagtaaaattaatttatatttgcaatcccaataatcctactggtaatattttttttaaaaaagatcttatttttttattgaatataactttaggacaggctctagttgtaatagatgaagcttatattgaattttcaccagaagaaagcatgacaaattatttaaaagattatccgaatttagttgttctacgaaccttgtctaaagcttttgccttagctggaatacgatgcggatttactttagctaaaaaagaaattattcaaactttaagtaaagttattagtccttatccaatatctatccctgtctctgatatagctatacgatctttagaaaaagattatgttcaattaatgaaaaatagagtcttagattcaaacaataatcgtatttggttgattaatcaattgaaaaacatcacatgcgtagaaacagtatttgaaagtaatgctaattatgtattagtaaaattttctatgtttgaaaaggtttttgaaactttatggaataaaggtataattttaagaaatcaaaatgagaaaacgaatttaaaaaaatgtataagaatttcaatgggaacacgatcagaatctttgcgtttaattaaagagcttaaaattttttctaaaaaaaacatgtgtcaaggtgaaatgagtgaaaaataaaatattatttattgatcgagatggtacattaattgatgaaccaattaatacttttcaagtagactcaataaataaattagtatttaaaaaatatgttatttcctcattacgtaaattagttgaactcgactataaattgataatgattactaatcaagatggtcttggtactgaatcttttcctttacaagattttagtacagctcatctttttatgttgagtgtttttcgttcagaaggggttatttttgatgatatattaatttgtcctcactttttagatgatgactgtgtatgtcgaaaacctaaaataaaaatgatagagccatggttagataaaatagacttaaagaagagctatgtgattggtgatcgagatacagatatgcaactatcaaataaccttaaaataaaaggtataaaatacaaagaagatatatgtaattggttacatatcacaaaatacattataaaacataatagatatgctgaaattatcaggagaactaaagaaactaaagttagtattaaagtttggttagatttagaagaaacaagtaagattgatactggtgtaaagttttttgatcatatgttagaacagttatcagtacatagtggtatttgcatgaatatttctgtacagggagatcttgatattgacgatcatcatacaatagaagacacaggcattgttttaggagaggctttattgcaagctttaggaaaaaaaaatggtctatctagatttggtttctacttgccaatggatgaaagtagatctaattgtatcatggatatatcaaatcgtccgtatttaaatttcaaagcaaaattcaatcataaaatggctggagatctaagcactaatatggtagagcattttttttattctctttgttactctatgaaaattacacttcatttatatgctgaaggtaaaaacgaccaccattgtattgagagtttatttaaagtttttggacgaacgttacgtcaagctattaagatagagggaaatatgttaccaacttcaaaagggattttataatgtacatagtaatagtagatacaggttgcgctaatttgacatcaataaaagtagcaattaataacttaggttataatgctacaataacttctgaatcatcaattattttaaagtctaataagatttttttaccaggagtaggaactgcctcggcagtaatggatcttttgtctaaaaaaaaaatcatcaatgttattagagaatgcaaacaaacaatattaggaatatgtttgggtatgcaacttttttgtgcttctagtgaagaatctaatggcgtaaaaacaattggtattattaaaactcctgcattgcgtttaaaagttaataatttatctttacctcatattggttggaatcaaattacatttcaaaaaggacatgctttatttaaaaatataccaaataattcaagattttattttgttcatagctatatggttccaataaataaatatacattatctacaactaattatggtattaattttagttcaataatacaaaaagacaatttctttggcgttcagtttcatccagaaaaatctggaaatatagggtctcaattgttaaaaaattttttggagatataattgaatgattattcctgcatttgacttaatcaacggtagaacagtacgtttatatcaaggtgattattcgaatcaaaaaaattataatgtaaacttattcaactccttagaagtatacaaatcaaaaggaattgagatagttcatttagtagatttagatggtgcaaaaaatagcgcaaatagacaaatagaattgtttaagaaaatagtttctcatactaccgtacctgtacaagtaggtggaggaataagaactacaaaagatataagcacacttcttgatttaggagtcaaaagggtagtaattggttcttctattgtaagtaataaaaaacaagtaaaacaatggttaaatttttatggtccagatgcaattgttttagcattagatgtacatgttgatggtagcaacaaaaaagaaatctctattgatggttggcaaaaaaaaacaaattttattctagaggaaataattgaatatttcttatctagtggtttaaaacacgtattatgtaccgatatctctagagatggaacacttttaggaccaaattttaagttgtacaaagaaatttgcagcaattttaaaaatattaattttcaagcatctggaggtgtagcatcattacaagatattatttttttaaaaaaaactggagtgaagagtattattattggtcgtagtttattagaaaaaaaatttacaatagaagaggctgttaaatgctggcaaagagaatcatagcgtgtcttgatgttgatgatggtgtagtagtgaaaggaattaaatttcagaatcataaaatcgtaggcgatattgtaccattagccagacgctacgcaaaagaaggtatagatgaattagttttttatgatattactgctgcaacaaaaaataaattagttgatcgtagttggataaaaaatgtttctaaagttataaatattccattttgcgtagctggaggtattaaaagtgtagaagatgctaaaaaagttttatctagtggtgcagataaaatatcaatcaattcttcagcattaatagatcctaatttaattactaaaatttcagaacgttttggtgtacagtgtgtagttattggaattgattcttggtttgataaaacaaaaaattcttatatggtacaacaatatacaggagatattagtaaaacttatcaaacgtcttggaaaacatctgattgggtaaaaaaagtacaagaaaaaggtgctggtgaaatagtgttaaatatgatgaataaagatggattacaaaaggggtatgatatatcacatttaagtgaaataagaaaaatatgtaaagtacccttaattgcatcaggtggcgctggaagtgtagaacacttttatgaagcattatattattctaatgttgatggagtgctagctgcatctgtttttcataaaaatatagtagagataaaagtgttgaaaaaaaaattaattgcgcgaggaatggagattagagagtgttaaaaaaacatgatttattaaatcttgattggacaaaaactaacggtatgattcccgtgatcatacaagattattcttcaagtgaagttttaatgcatggatacatgaatcaagatgctttgactaaaacccaagaagatggcttagtgacattttattctcgtactaaaaattgcttatggactaaaggggaaatatcaggtaattacttaaaagtaattgaaattagtacagattgtgataatgatacattattaattttagttgcagctcaagggaaaacatgtcatttaggtaattcaagttgttttatttcaaataaatacaatataaattttttatttaaattagaagaaattatagaagagagaaaaaataaattttcagataactcatatacatctagtttatataaatcgggaacaagtcgtatagcacaaaaagtaggtgaagaggctatagaaacaatattagcagcgatgaataaagatcagattgaattaattaatgaagcttcagatttaatttatcatttagtcgtattgttacacgaccaagatttaaatttcaatttagttattgataacttaaaaaaaagaagagaaaaaaatctgaacactaattctgaaaaattattgaaataatattttggaggcactaaaaaataaatttataatatttcaacatcacaataaattttaataatataagaacgtgtattttatgtattatcatatttaaaaatatccatattaaaaatatttattaaatagcatatcaattaatgtttttatttaaaaataaaaaataaaagtcatgtttttaaaaagttttatctatattttaattgatagatattctttatgaatgttttattttaaactaatagaaagttgaaaatatttaaaatatgatttactgtttaagtaatttaataaaatttaacaatgtaaaaagataattattgaatatctctttgatatattttagttggaggacaaaatgtcacggcaacaaataggtgttgtcggaatggcagtcatgggacgaaatttagcattaaatattgaaagcaaaaattacagcgtatctatattcaatagaactagatcagtaacagaagaagtatttaatcagaataagaaaaaaaatattgtcccatatttttctattaaagattttattgattcacttctcaagcctagatgcatcttattaatggttcaatctggaaaagctactgatgaaactatcaagatgattctgccctatttagaaaaagaagatatattaattgatgcaggtaatacattttacaaagacactattcggagaaatgaaaaattatctaaatatgagattaattttattggaatgggggtgtctggaggtgaattaggagcattaaacggtccctctattatgccgggcggacaaaaagaagcatacaaacttgttttacctatgttagaaaaaatatcagcaaagtttaaaggtgagccatgtgtaagctatattggtcctaatggtgcaggtcattatgtaaaaatggtacacaatggtattgaatatggtgatatgcagttaatatcagagtcatattttttattaaaatatttattaaatatgagtaatgaagaattatcatctacattttctaaatggaataaaggtgaattaaatagttatttaattgaaataacaaaaaatatttttattgaaaaagatgaaaagggaaaatatttgatagatcgtattttagatgtagcagaagataaaggtactggtaagtggattagcaaaagtgctttagatcttcgagaaccgctttcattaattactgaatccgtttttgctcgttatttatcttctctaaaaagacaacgcataattgcatcaaaaatattacagggtccaaagataaaaacgtttattaaagataaaaatagttttattgaagaagttcgacgagctttatatttaggtaagataatttcttatgctcaaggtttttctcaattaaaaagagcgtcagaaaaatatcattggaatttaaaatatggtgaaattgctaagatttttagagcagggtgtattatacgagcaaattttttacaaaaaataacagacgaatatactcaaaataaaaatgtagttaatttattattaacaccttatttttccaaaatagctaatgaatatgaaaattcattacgcaatattgttatgtatgcgataaaatatggaatttctactccaactttttctgcggcaatatcatattatgatagttatagagcattatatttaccggctaacttaattcaggctcaaagagattattttggttcacatacttatcaaagaacagatcagactggttactttcatacaaactggtctcaataaaaaacattaagatagttgatatttatatatgaatatcatatttcttatattactgctactagtttatgataaaaaattaaaatagcagacgatgttagaaaatatctctgctattagattatatctattacttcatatattttctttgttttataacacgtgatgttaaaatatatcaaagataatatcatagggataaaaatgcgtttatgtgataaagatattgaagagtggttggagagaaaagaattaattatagaaccttatcctaataaaacattaattaatggcattactgtcgatatacaccttggtaataaatttcgttttttttatgaacatactggatcttgcattgatttgagtaattctaaaataatcggtggattatcattaacggaaattatgagtaatgaaataatattttctaaagaacagccatgttttttacaaccaggatctttagtattatgttcgacttttgaaagtattaaaatgccaaataatttagtgggttggttagatgggcgttcttctttagctcgtttaggattaatgattcacgctaccgctcatcgtattgatccaggttggaatggtaatattgttttagaaatgtttaatgcaggaaaattaactttagtattacgacctaaaatgaggattgcagcacttagctttgaagttctatctcaaccagttttacgtccctataatttaagaaaagaggctaaatataaaattcaaaatggagtagttcccagtcgtattcataaggaataaagtttttacgtaatatactatgtatattttttaatttcttagttatatcataagtcaattattcataaaactatttttttaaatcaagaatagtttataattattatttttatatcatattactctatttaaaaaaaatataatattatgtcaagtgtatttagaaaaattttagttacctgtgctttaccttatgctaatggttctattcacattggccatatgttagaacatattcaagcagatatttgggtacgttatcatagaatgcgtggtcacgaagtatggtttgtttctgctgatgatgcacatggtactgctataatgttaaaagctcaagatttagaaatatctcctaataaattaattaaaaatattaggatagagcatcaaatagatttttcgaattttaaaatttctcatgataattattattcaactcatagtttagaaaatttatatttatcaagaaaaatttttacatgtttaaatgaaaaaggtttaattaaagaaaaaaaaattttccaactttatgatacagtaaaaaaaatttttcttccagacagatttataaaaggtacatgcccaatttgtaaatcaaaaaatcaatatggtgataactgtgaaatatgtagtgcaacttatgagcctacagatttaattaatccaatctctgttatttcaggaaaaaaacctattttaaaaaacactaaacatttatattttgatttaccttcttttactaatatgttaaaaaaatggatacattctggtgttttagaagaatcagttattaaaaaaacagaagaatggtttaaagtaggtttaaagtcgtgggctatttctcgtgatgcaccttattttggttttaaaattccaaattatcctaacaaatatttttatgtttggcttgatgctccgatcggttatattagtgcgtttaaaaatctttgttttaagagtaaaaaattaaattttaatgaactttggaaccaaaattctaattatgaattataccattttattggtaaagatattatttactttcatactttattttggcctgcaatattagaagctgtttcttttagacagcctagtggaatttttgttcatggacatcttactatgaatggactgaaattgtcaaaatccagaggtgctttgattaaagctagtgattggattcagtatttcgattccgatagtttgcgttattattatgcaagcaagttatctaataaaacccatgatattgaaattaatttagaagactttattcaaaaaataaatagtgatatcgtaaataaactagtaaatttagcagcaagaaatgccagttttattaataaatattttaatgggtatttatctgataaattaagcaatataaaattatataaatattttgttaatactagtagtagtattgaagatttttttgaaaatcgtgaatttagttttatagttaaagaatcaatgagattattagatgtagccaatcaatatattaatgaaaaaaaaccatggaaaattaaaagaacagaagaaaatatcagggaattacaaaatatttgcacaatgggtattaatttatttagaattataatgatttttttaaaacctatagtacctgatttagcaatcaaaacagagtctttcttgatttctaaattgacttgggatggtattaaaaaaccattattatctcatcagataaataaattttttccattatataaaagaattgatgtcgaaaaaatgtttgaattcatgaatatatgtagataataataaattttattataaagtatgacaatttttcctaattaattactttaataaaatgaaaaaaaattattagtagttgattttaaatcattttgccaggatattatgcactttgttctatttttgttttttatattaacaacaaagactcctatggcactgataaaataattattataaaataataggggaatttgatttctcaaccaaggagggatatttttttcttgccatattttttttatttttctttttttacttcttcctaaaattaagacatatccttcgtattgaaaacgaatattaattaattcattttctttaggaccgggaagtacagtgccgttgttattttttattaaatatcctaaattattaggaagtgttagttttatattgtttttatgccaaaacaataaagtatttttgagactcggttgagtttttataaaatgaagtgattgtttataacgtctcacttcatgtttgcctaaaataattttaggatttgaatctatacgactgaaaatcatttgacgataaatgcattgaatatttttgtatgatggcattttaattttttttaacaaaagccagtatctaattaaagctgtgcacattgcttgttttatatttttaaaattctcgatatttaaagaatcatcaaattttataagtttgtatattctttcacgaagaaaatcatttaataatcttgtttcttgttgacatataatagttgtacgaaaacaattttttaaaaaataagaccatcttttttctaatatagggataacttcatttcgtataaagttacgatcataatcaatatttaaattactaaaatcttcaatccagtgtaatttttttttcttagcccatgtttgtagttctatttttgttttttttagaaaaggacgaactatttttttagtcccaaataaagtctcaaaagacatgctggaaagaccagtaggaccacttcctctttttaaagataaaaagaaagtttcacattgatcatttatatgatgaccagttagcagtatttcgtcagaaaatagatgattatatataatattatatcgttttattctgagtttttcttcaagattatttgttttgtttttaatgttaatattttcaactatcaatgggatatgatttatattgcaaatttttttacagtgttctgaccatttttttgatagtaaagtaagattatgattgatatgaatagcacgtattttaatgtagtattttttttttatttccagcaatttataaagaagtacggttgaatctaatccaccactataagcgactaagaatgatttattttgatattgactaataatttctttaatcaaaaaaattacctataatttaatttttttaatacgttcgagtggacttgaaccactaacttctaccatgtcatggtagcgctctaaccaattgagctacgaacgtaaaatatttaaaaattttttgatatttttatgattttaattatatattattattaatataatatacaaatattttttatcattaataaatataaattaaagatattattttgaggaaagattatgtttacaggtattataaatggaacagctactattgtttatatagaaaagaaaaaaaaaaaatatagatatacagttgaacttccatcaaatttatctaaaaatttaaagttaggtgactcaatatcacataacggatgttgtttgactgtaaaattaattaataattcttttataatatgtgatgttattcaagagacattaaagagtactaatttaggaatattaaatattggagatagtattaatattgaaagatctataaaatatggcgatgaaatcggtggtcatataatatctggtcatgttatgaataccgctgaaatttctaaaatgtcaaagtcagacaataactgtgtaatatggttaaaaatgaataatatgtctttaatgaagtatattttctataaaggatttatctgtgttgatgggattagtctcactgtcaatgatattattaaaaatgaattttgcgttaatattataccttatactttccttttcactactataaaagataaaaagaacggtagtttagtaaatattgaaatagatttttatactcaaacaattgtagatactacagaacgattaatcaataataatttaaaatcattgtatgattaacattgaaaattaatatactttatcttggaattataaatgaaacattatattttattttttatttctaatatattaattgaaaattttattctagtaaaatttctcggtttgtgtccttttttaggagcgtcgagtaatattgaaactgcttttggaatgagttgcgcaactactttcgttatactcacatcatcagtattattatggtgtgttaattttttcattttgttacctctggatttaatttatttgagaattattgcttatatgttaattgtttcagttagtgttcaatttttagaaatagtgttacgaaagacgagtcctattttatatcgtttacttgggatttttctcccattaattacaactaattgtacagtgttagctattccattattcagtttatatgaacatcatacatttttagaatctatattttatgggttaagtgcatcgttaggatttgctttagtgatgattattttttcttgtattcgtgaacgtatagtattatctgatattcctttgccatttcaaggtgctcctattattttaattactgtaagtttaatatctattacatttatgggttttaagggtttgataaaaatttgattatgataacacttattatttttagttttttgtcttttttattaggaattatattaagttttactgcttataagtttcgatctcaagaagatccaattgtagcaattgttaatgaactattgccccaaagtcaatgtgctcaatgtggatattctggatgttatccttacgcaaaagcaatagtagaaaattctgaaaaaattaataaatgtattcctggtggaactgatcttatttcagcaatatctagtgtattaagtatagaagtacctgaaaaaaatttaatcatcacacataaaaaacaaaaaaataatactgtattgattaacgagagtaactgtgttggatgttcaaaatgcgcttctttttgcccagtagacgcaatagtgggagcgcctaattttatacatacagttttgcaagaattttgtactggttgtaatatttgtttattacactgtccaactaattgtattgaaataaaaaaagagacttatgaagaataaaaaattattagaaataaaaaaaatttttaaaaaattcttttctataaaatcatggaaaaaattgattttttctgcttttaatgtaaaaaaaaatataattttaagggtggtttaaaatgttcatttaaaaaaaatcaatctgattatgtattattaaaatctttgcctttacccgataaattttttctcttcatacaagacgattatcataatgtaaaattacgtgttaaaataaacgaaaaagtattacgtggacaacctttgattttcagtgatgatttcaatgttcctgttcatgctccaacttctggtttaatagaaaatatttgttttaattccgattctattaaaaaaaatataaaaattgtaatttctcctgattacttagatcaatggattagattgaatcctattaaagattataaaaaatacgctccggaaaaattaattaaaattattcatcaatcaggtgtagttggtcttggaggaggtcagtttccttcttcaaaaaaaataatatttagcattaatagagcacatactttaattgtaaacgccgtagaaagcgagccttatataacatcagataactgcttgatatataatcatatatctgaaattttgataggatgtaagataatttgctggataactaaaataaaaacagttcttattgcgattcaagaagataatattcaatcaatttctaaaatacaacatttgattaaaaataaatcattgtttaaaatttgtattattaagaagaagtatcccgcgggtagtagtaaagtacttgtaaaatctttaacaggaaaagaagtacctcatggtaaacattctatagatataggataccttatatttaatgttgctacaatattttcaataaaaagagccattattaatggaaaaccactaacagaacgtgtagtgactttaatgagtgataaaaaccttttatctggaaacttttgggttagaattgggactccaataaaatattttttaacaagtaataaattaaaacaatcttttattgcatctgtatatttaggaggtccattcatgggtaagaagattaataatttgaatcattctatattaaagaaaacaaattctatttttattacacataaaaaagaaaaaaatgaaagtatttctgaaaaaacttgtattcgatgtggttattgttcatatgtatgtcctgtaaatttgcttcctcaacagctttattggtatattaaaaataagaatcatgtacaaacaaaaaagcattatgttttagattgtattgaatgtaaagcgtgtgagaaagtgtgtcccagttatattccgctagtaaaatattttattcaagagaaaaatattttaaaaaatattacattagaaaataatcgcaaaaaaatgtcattaattcgttttaaaacaagagaacaacgcttattcaatgaaaaaagaatgatacatgaaaataatgatacatttcttatgaaaaaaaaggataaaaaaatcaataatatcacaaaaacagtgctaaaaaaaacacttcaagatgctatagaacgtatgaaatccaaacaataaagttttatataaatatattatatattaatacataacgtgagaaaaaaatgaactttccctgcatatatcatgtttatagtattagaaaaataatgtttcttgttattgtagcttgtcttccaggtatttttgccaagtattacttttttggtattggtactttgatacaaatttttttttctatatttatttctttagtactagaaattattattttaaagatacgttctaaaaacattaaaaattatttacaagatacttctttagttttaacttcagtattatttggagttagtatcccccctttgcttccttggtggatgacaagtattggtttattttttgctattgttgttgctaagcatttatatggtgggattggtcaaaatatatttaatccggctatggttggatacgcagtattattaatatcttttccagtttatatgaataattggaatgaaagagatttttctttatctttttttaatgattttaaaaaatctgcatatattattttttttaaaaatgatataactactgttagtagtagttatttaaatattatcccagatgcttttacaacagctacacctttaaacaattttaagattaaatctcatttaaaagatgacttttttctaaaagaaaatattattaaaaataaagaagtttccattcaaactagttggaaatgtataaatataagcttttttttaggtggtatttttttgttgtttacaaaaattatttgctggcgtattccaattagttttttatcctctttaggaatgttatcaattataacttatttttattcaaaagaattatttatgtctcctcaagtccattttttttcaggaggaactatgatatgtgctttttttattgctacagatccagtaactgctgcttgtaataatgtaggaaaaatagtttttggtattattatcggttttttagtttggattattcgtaattatagtgattatccggatgcaattgctttttctgttttatttgcaaacatgactgtgccgttagtagattactatacaaaatcctctggatatggtcgtaataatatatgaaagcattaaaaaaaatattaaaacatgcttgtttaatgagtcttttttccattatatctatagcaggcatcacattgataaataatataacaaaaaacaaaattattaatcaaaaagaacaagaaaaaaaaaaatattaaaagaagttattccttctaatatatatcatacatttgaaaaaaaatcatataaaatcaaaaataaacttttaggagatcataaaattcataatttatgggtgttatttaaaaataaaaaacctgtagctgcaatagtagaaactacagctcctgatggatattctggtgccattaatatgttagttgcagcatattttaatggagaaattattaatgcaagagtgctatctcataaagaaacaccaggaattggagataaaattgacttatctatttctaattggatcactagatttactggcatgtatgtagcttctatagaagataaagattttaaattgcgaaaatatggaggaaaaattgaacagtttacaggtgctacaataacaccgcaatcagtaacaaattctatcaaaagaacggttgtttttattaaaaagataccgttcatatttgattttttaaataagggtatttatgaatatcaaaagttttttaaataatagattatggaaaaacaattcttctttagtacagttattaggattgtgtccagttttagcaatgacaactaatgccattaacgctataggattaggaatgacaactactttagtattaactattacaaatactataatttcttcttttagaaagattataccgaaagatttaagaattccaatctatatgatgattatttcttctgttgttacatctatagaaatgttgcttcatgcttatacgtttaatttatatcaatctttaggtatttttatcccattaatagttaccaattgtattatcgtagggcgagcagatcttattgcttataaaagttctatagtagaatctttttttgatggtatttttataggattaggttcaatgtttgctatgtttgcagttggttctatacgagaaatattaggtaatggaactttgttttttggagccaataaaattatctctaatatacatagttctgttttttttacattactagataaaaaatttactataattttggctgtttttcctcctggtggttttcttatattaggcttcttaattgccattaagaattttatagatttatattataaaaaaaatactataaaaaatattgaacaatgttcttgttctaataaaataaagtaacaatattaaaatgaataaaaaaaaacgttatgagattttatcgatattatctcgcaacaatcctgaacctaagatagaattgtttttttcttctgattttgagttattattatctgtaattctttctgctcaatctactgattttattgtaaataaaacaactaaaatattatttaaaattgcaaacactcctgaaactatttttttattaggactagaacgtcttaaaaattatattaaagatatcggtttgtataataccaaagcattaaatattattagaacttcttttatcatattaactaaatataatagtattgttccaaataatcgtatcgaattagaatcacttcctggtgtaggaaggaagacagctaatattattttaaatatattatttaaaaaaaaaactattgccgtagatacacatgtttttagagtatgcaatcgtactaattttgctaaaggaaaaaatgtcaagatagtcgaagagaagttgattaaggtagttcctagtatttttaaactaaactttcattcttggtttattttacatggccgatatatttgtactgcacggaaaattaaatgtaatatatgtttaatttttaaattatgtgaatttaaacaaaaaattttttaatatattttttatggatctataagtgattattgtaaaagttattttgcccatccctattagacaatattttacatatcttatgcctgattttatgtgtcctattattgggggtcgaattttagtcccatttaattcaaaagatgtaataggaattgtggcttctttttataaaaaaaataatgtagaccaagcaaattttaaacatattaaagcattgattgatactgagtcactttatagtaatatggtactagatattatatcgtggataagtaacaattaccattgtccggctggtaatttatttttttctattttaccaaaaattttacattctgattatattataaaaaacaaatatatctgtcagtggagtattacaaaaaaaggacaagaattgaatctaaattattttaaaagaagaaaaaaacaattgtatgtgcttcttattttaaagaagaaacatattttgagcactgaattaaaaaaatataatatatctaaaattattttaaagaaattagaaattcaagaattatgcaaagtaaacttaaattataaaatatcttttaaaagaaaaattattaggacgaaaaaaaaattatttttcaataaaaaaatatcaattgttctcaatgatgttctaaaaaaacaatgtttttcatcttggttattaactagagttaatttatatttaaaagttaaattttatctaggtttaattcagtcggtattatataagggtgtgcaaattttaattttagttccctatattaaaaatataaatacaattgcattttttttagaaaaatattttaatgcgtctattgatgtcatgcattcaaaattaacgtcttctaaatatttttcaaattgggtaagaactaaaaatggtgaaaattcaattgttattggaacaggaaaaagtatttttttaccttttttaaagttgggtctcattattttacttgaagagcataatttaaaatataaaagtataaaccaatgcagatataatattagagatttaggaatacttagagcatataaagaaaagataccgattattttagattcagaaactccttcattgaaaacattaaataacgtcttacatagaaaatgtttttacattaaattaaataaatataatcatgttaatcaaataaataataatattattaatttaaaaacagagaaaataaaatttggtttatccttaactttgataaatgaaatttataaaaattttacaggaaaacaagttttattaatttttaataaatttgttttatttttttttgtcttaatgtgtcagaaatgtaatgagatatttaaatgtactaattgtgatgattattttgaaattaatcaatatcgtaatattttattttgcaaattttgtttaattcaaattaaaaagccaattttttgctacaattgtggatctttttctctaattgtatttaaaataggcgcagaagaaattaaaaaagaaatgcatagtatttttccaaaaatcccattttttttctttctaaatgaaaaaaatattaataaaaacatattaaatactaaaagttttgaatttgctatttccagtccttgtattattatcgtaacagaagaattagtacaaaattactattttcctcatgtaaaattgattagtttaatttgtattgataactattttctctcttttaactatcgagctatggaatattttgctcagttttatattaatttaaatcaattaactagaagtacaaaaaaatcatgcaaaatatttatacaaacatcatttcctaatgatataaatttaaaagaaatatgtaacaacggatatttttctttttctaagaaagcaatggcaattagaaaaagttttttattacctccttggagttttcaaactattgtttattccgcaagcacaaatactaaatataatattatttttttaagtttaatgcgtaaaatactacaaaaaaaatctcgtaaatataattgttttttatgggttttaggtcctaataatgcttttttatcaatcaataaacataaatattttcatcaattattaattcaatgttcttcacgtgttgctcttaataatgtattaaatgaatcgattgatgtaattaatattttcactatttcaaaacgggttaaatggtttatagatattgaaccaaattaaaataaaatagaaaaatattataataaataattagtaatttgctcttttactcgttgaatttctaataaaattagcataaaatattttacaagaacttgtaagatataaataaaaaaaataattaatttttaaaatattaataataaaaaagaggctttaatgagtgaatttaatttcatcagtagattgcacaatagaggtctaatatctcatattacaaatgaagataatttaagtaaactcattgaaaataaatcaatttctctttattgtggatttgatcctacagaagaaagtcttcatataggtcatcttttacctttaattatgttaaaaagatttcaaatagctggtcatagaccgataattttaataggaggagcgacaagtttaattggagaccctagttttaaagaaaaagaacgtgttttcaattctaattataacgttaatatatggacagaaaaaattactaaacaaatttcttgttttttagattttaattgtggtaagaatagtgctgttttattaaacaataatacatggttcaaacagattaatatcttatcatttttacgagatgttggaaaatatttttcagttaatactatgattaatcgagcagcagttaaacaacgaattacaaggccagaccaaggcatttcgtttacagaattttcttataatttattacaagcatatgatttttttattttaaatcagcaatatcaggcagatcttcaaatcggaggagctgatcaatggggtaatatctcctcaggaatgcatttaatacaccgaaaaactaagagagtagtatatggtttaactgtacctcttctaattcagtctaatggaatcaaattcggtaaaacagaatcaggaactatatggttagattcaaataaaactagtccttataaattttatcagttttggatgaatatagaagatgctaatgtttattattttttaaaactatttacttttataaaagtgtcagaaattaataaactagaaaaaaataaaaatattaaaaatcaaataattaacgacaaatctttacttgctaaacatattacccagttagtacatggaaaagaaaaattactagcggcagaaagaattacaaagtttttatttttaaagaatactactcatattgaagaatctgatttgcaacagttaaaacaagatggtataccatttattgaagttagtaatgtaaaagatttacaagaagcattagtattaacttcattagcgcaatcccgaactcaagctaaaaatatgataatttcaaattctatatctattaacactgaaaaaattagaaaaaatcatatttttcatgaaaaagataaattatttggaaaatttactctattatctagaggcaaaaaacaacattctttattgtgttggtaattaatttttagtttattgaaaaactttcaccacaaccacaaaatttttctaatttggtattataaaatttaaatattttattgatgttattttttacgaaatctattctaataccttctaaaaatggtatatctttagaataaatatatattaaaatattttgataaaaaaaactaacttctttttcatctttttcttttttcaattctgaagcctttagtaatttcatactgtagcgaaaccctgcacatcctgatttttttatgcttaatcttattcctatattatcagaatttaaattaattaaaaataaaatttgttctatagcatctttggtgattgaaatattttgaaatgtatttttttttaataagtaggttttaacttcgtttttattcatgatgttctcttatttaaaaatatatttataaaaataaaaaaatatttaaaaaatacttgtattgtacagaaatatttatgttttaaacaatattattgtttattaattatttttataaattttaatgttataattctttttaagaaaatatagaattttataaaattacattaattgtaaaaaaattatctataatataaaaatattgaggtacaacaattatatgcaaaatccaaaagagaaaatggatttatcgcagtctattttatcactgatatttattgtttctatgggtgtaataagttttttagtaattcatccatttatattaggatttttttgggctagtatgattgtaattgcgacttggcctcttatgttgaaaatacaaaaaattttaggtggaaaacgttctcttgccgtgataattatgattataattttgcttcttttatttattatccccgtattttttctagtaaacagtttaattgcaacaagtatacctattattcattggctaggttccaatgatctagaattaccagaattagcatggttacagaatattcctcttatgggaagaaaaatatttaatagttatcaaacattattaaatagtgatgggggtgaattaattcataaaatacgaccttatatgggacatgcaactgaattttttataatacaagttagaaattgcggattatttattgtacattctatattaatgttattttttagtgctctattgtattggaatggtgaaaaaattagcatttctattcatcattttgcatatcgactgagcgaaaaaaatggtaaagctattcttttactggctactcaagcggttagagctgttgcattaggtgttgcagtaacagctttaattcaagctttattatctgggataggattattagtttctggcgtcccttattgggctctattaatgataataatttttttttcttgtttaatacaattaggaccattacctattttaataccttcaattatatggctttattggaacgatgatactacttggggtacaatattgttaatttggagttgttttgtatttatacttgatcatatacttagaccgttttttatacgcataggagctgatttacctattttattaactttatctggagtcattggtggcttattaacttttggtatgattggtttgtttattggtccagtagtattagtgatattttatcgtttaacaatatcttggatatacggaatttcaattgcatcttttttagaaaatacatcgttaaaataaaattttaattagtatttagataatagagaaaataaatacttttaattaaatataatctaaattatgataatatgtgcaagataacttagttatattcaatattcactaaacagaaaaagaattatattctataactatataagacatcatctttattttttctgtttaaaacttccgtcatattatttaaagtatactattaaaaattattctccctaatattatgaaagttttttctatcaagtattttaaaaaactattagaaatgagattataactggttagttttttgtgattgttatgaaaccttcatattctttccagaataaaaaacttgttttagagaacaaaatgaaaaaaacagatgaactacgtacaatacgaattgatccattaataactccagctgaattagcaaggcagtacgcgatcacttcagacatcatggacactgttatcgcaacaagacaaaatattgctcgtattatgactggacaagatgcgcgactacttgttgtaataggaccatgttcagttcatgatcctatcgcagcagtagaatatgcacatcgattgtatgaattacgagtaaaatataaagatcgtcttgaaattataatgcgtacatattttgaaaaaccaagaacagttgttggatggaaagggctgatttctgatccagatttaaatggtagttttcgagttaatcatggattagccgtagcacgtaaattattattagatattaatgcattaggaatgcctgcagcaacagagtttctcgatatagttataggacaatttatagcagatttaattagttggggtgctattggagcaagaactactgaaagtcaaattcatagagaaatggcttccgctctttcctgtccagtaggttttaaaaatggaactgacggtaatatacgcattgcaattgatgctattcgcgcagctaaagttagacatttatttttcgcgcctaataaagatggtcaaatgacgattaatcataccagtggcaatccatatgggcatataatcatgcgaggtggtcgtgcgccgaattaccatcctgatgatattaactcagcagtaaagcatttacgtgaatttgatctattagaacatttaatgattgattttagtcacggtaattgtttaaaagaacatcttcgtcaaaaaaatgtttctaagtctgtttcatatcaaatttctcatggttcgaaagctatttttggtgttatgattgaaagctttttagaagaaggttttcaaacagtaacgaataatcaaccattaatatatggtaaatcgattactgatgcctgtttaaattggaaagacagtgttttaattatcgaacaattagcagatgccgtagatgctcgtttttaattcacatgctagtcaaaaacacttggctagcattttttcaatttttaaaattatttttatagtcagtatataaaaaatatataagtatttttttaatgattgattttttcataggaaaaacaattaatatttttaattaaggattaaaagaatgcctgtaataagattttatgatggaagtcagcaggtgtacgagcattctgtttcattaatagagattattaaaaacaaaaaacctagtataatgaaatctcttattgcaatttctgttaataatcatttttcaaatttaaatacttttataagagaagatgcttttatagaatttgttgatcaaaaaaattataaagcattgaatatcattcgatattcctgcgcgcagcttttaagctatgctataaaaaatatatggcctctggctcaaattgctacaagtaatattatagaagatggtttttattgtgatatagattttaaaagaagtatttcagaaaaagacttgattttactagaaaatcagatgaagatgctcgtaaaacgtgaatataatattttaaataaactaatttcttattctgaagctagagaaatatttcaaaaatgttttgaaaaatataaagtttctttaatagatgaaaatattaattgtaatagtaaagtttctttatattatcatgaaaattatgcagacattgatataggactacaagtttttaatataaaattttgtaaatattttaaattacaaaaaattggaggtgtttactggaaaaaaaataaaaataataaaatgttacaacgtatttatggtactgcttggactaataagcaggaacttgataaacatcttgattatttaaatgaattagaaaaaagagatcatagaaagattggaaaatttcttcaattatatcatatgcaagaagaatctccaggtatgattttctggcataacaaaggttggattatttttaatgaattacaaaattttgttcgagttaaactaaaagaatataaatatgaagaagtgaaaacaccattattgatagataaattaatttggaaacagagcggacactgggataattataaaaatgctatttttactacgttatcagaacatcgagaatattgtattaaaccgatgaattgtcctggacatgtacaaatttttaatagtagattaaaatcttatcgagacttacctattcgtatggcagaatttggaagttgtcatcgtaatgaaccttcaggttctttgcatggtttgatgcgagtacgcaattttactcaagatgatgcacatatattttgtactagagaacaggttcgttctgaaattaacgattgtattaaaatgatatatgatttatatagcacctttcattttaaaaaaatattagtgaaactatctactcgtccagaaaaacgtattggtactgattctttatggaatgaatcagaaaaagatttatctgacatgttaatagaaaatcatttatcatttgaatatcaatcgggagaaggtgctttctacggacccaagatcgaatttattttacaagattctttagatcgaaattggcaatgtgggacaattcaacttgatttttatttaccattgcgtttaagttcattttatattaatgagaaaaatgaaaaaaaagtgcctgtaattattcaccgagctatattgggttcaatagaacgttttattggtatactaattgaagagtgttcaggtaatttaccaacatggttatctccagtacaagtagtaataattagcatcactgatattagttcaggatatgttaaagaattatttaaaaaattctctgacgttaatattcgtatagaatgtgatttaagaaatgaaaaaataggttttaaaattcgagagcatacactacgtcgaattccttatatattaatttgtggtgaaaaagagagcagttctaaaaaaatatctgttcgcaacagacaaggtcataactttggaatgatcgatgttgatttttttattaaaaagttgcaaaaggaaataatcactcgtaacttttatcaaatggaggaataaagtattaaaggtggaaaaatagttcaattaacacgtcctaatcgtattaatagtgaaatacgtgcgataaaagttcgtcttacgggcgtcgaaggcgatcaaattgggatagttaatttacgtgaagctttaaaaaaatctgaggaattaggattggatttagttgaaattagtccaaatgctgaaccacccgtttgtcgtattatggattatggtaaatttctttacgaaaaaagtaaatcatctaaggaacagaaaaaaaaacaaaaagttattcacataaaagaaataaaatttcgccctggaactgatgaaggtgactatcaagttaaattgcgcaatttaatacgttttttagaagatggtgataaagctaaaattactctacgatttagaggtcgtgaaatggcacatcaaaaaattggagtcgatgtgttaaatagagtgaaaaatgatttgattgaattagcaactgtggaatactttccatctaaaattgaaggtcgacaaatgataatgattttagcacctaagaagaagtagtaatttttaattaaattttttatcattaatgtatccattatttaaacaattctttacatttttttataatttaaatgaaatagtctatgccaaaaattaaaactttaaaaagtgcagctaaacgttttaaaataactgcctctggtaaatttaaacgtaaacaagcaaatttacgtcatattttaacgaaaaaaactacaactaaaaaacgtcatcttcgtcctaagattttagtgtctacaggagatatggatagagttaaatcttttttaccatatgcgtaaattaacttattttattaagattttacgaataggagagcataaatggctcgtataaaacgtggtgtaattgcccacgctcgtcataaaaaaatcttaaaacaagcaaaaggctactatggagctcgttctcgtatttacagggtggcacatcaagcagtaattaaagctggtcaatatgcttatcgtgatagaagacaacgaaaacgacaatttcgtcagttatggatttcacgtattaatgccgctgttcgtcaaagtaaaatgtcttatagtaattttatttttggtttaaaaaaagcttcaattaatattgatcgaaaaatattatctgatattgctatatttgatttgctttcatttaatgcattagttaaaaaagcaaaagaagctttgttgtaaatataaaattttaatacataataagaggggaaaattaatctcccctccattctaaaaatattaacaatactaaataaaattttttttatttttccattttagaatagttaattttaaaataagcttcctgtatggaagctttttagtatgtttaatatattaaacataattaaaacccaaaaaaagcgtgtaaaatgttaaatttaaataaattatttgaaattatagaaatagatatacaaaattcaaaaaaaatttccgaactagataaaattcgtattaaatatttaggaaagaagggtgtcttaactgcttttatgaagaagttaaaagatttttcttatgaagataaaaagaaacacagtattattattaataaaaaaaaacaagaaattattagtaaaataaatataaaaaaacaaaaactcagcgtgtatatcttagaacagcgtattaaatcagaaactattgatatatctttacctggacgtcgtactgaacatggtggttttcaccctataacaaatactattgattatataaagaatttttttttaaaattaggattccaatcaataaatagtcctgaaatagaagatgaatatcataattttgatgctttaaacatttctaaatatcatccagctagagatagtcatgatactttttggtttgatcgtaatcgattgttaagaacgcaaacttctagtatgcaaattcgcattatgaaacaagaaaaacctccaattagatttattttccccggaaaagtatatcgtaatgattacgatattacacatacacctatgtttcatcagattgaagggttaatagttgacaaaaatattaatttttctaatttaaaatggattatatataaatttttatacgacttttttggaaaagaggttttgattaaatttcgtccatcgtactttccttttactgtaccttctgcagaagtggatatcattgatcataatggaaaatccttagaaatattaggatgtggcatggtacatcctaatgttttaaaaaatgttaatattgattcaaaaatatattctgcctgtgcttttggattaggaattgaaagaattgcaatgttgcgttatggaataactgatattcgatctttttttgaaaacgatataagatttttaaaacaatttaaatataattagtgagacaaaatgaaatttagcgaaaaatggttgcgtgaatggattgatccacaagttagtagtaagattttacatgaacaaatttctaattctggtattgaagtagaacatgttgagaattttaaatctgaatttcatggtgttgtagttggtaaaatagtgcaatgtacttttcataatgaatctaataatttaaaagtacttaaagtagatataggcaaaaaaaaattattaaatattatatgcggtgcatctaattgtcgtaatggtataaaggttgcagtagctactgttggcgctactttaccaaaaaatattactattaataagaaaattttaaaaggagcatggtctgaaggtatgttatgttctttttttgaattaggcctgtttttaaatgataataaaattatcgaatttcctaaagaaacgttggtaggtattaatgtttatgattattttttattagaagataatattattaaagtttctattacatcaaatcgtccagatggcttaagtattttaggattatctcgtaatatagctgctattaatgatttaagaatatcacctttaaaaaatcgcttagttcctgcagttattcaaaaaaaaattaatattgatattcaagctgataaagaatgtatgaatttttttggtagaattatagaaaacatcaatataaatgttgatactcctttttggatgaaaaaaaaattatttttttctaacgttttgtcagaaaatattataactaatattattcattatgtattaattgaactgggacaaccattgaatatattggatgcagataatattaatgattctattatagtgcgcatggcaaggcatgaagaggatttatttttaaaaaataatataaaaataagtttaaatgaaaatatattagttttttctgattcaaataaaatattatctctccctggaaatattaattctaatattgttgatgtcgataaaaatactaaaaatatatttcttagttcatatttgattaatagaaaatatatttcttatattataaaaaaaatgaatatgaatacagtattagaatatcactattatggtgttgatcctttccttcaaaattatgctattgagtatgcaactgatttgattttaaaaatctgtggtggtgttcctggtcctatcaatgagaaaaaatgtaattttcagatccacaaaaataatacaataagattacatcatgaaagattaaacaaaataattggtttttttattgatacaagtgttatttcaaaaattttatatagactcgattatcaattgaaatttcaaaaaacattttgggacgttatttctcctagttggagattcgacatattaattgaagaagatgtaatcggtgatattctgcgaatatacgagtataataatgttcatttaataccattaaaagagtttttgaactgtagtaaaaaaaatgaactaacagattccttattaaaaaaatctgctgtgatattaattaatcaaggttatcatgaagttataaattatggttttattgatcctaaaatacaaaatttaattttcccaaacgaagaaaatttgttattatctaatcctatttctcaagatatgtcatgtatgcgtttatctttgtggcctggtttgcttaaaaatatttcttataataaaaatcgtcagcaaaaaagtatccgtatttttgaaagtggactctgtttttcaatagataaaagagaaaatcttggcatcagacaagaaatttttttagcagcagcaattagtgggaattatattaaagaaaattggtattataacataagaaaaatggatttttatgatttaaaaggtgatttagaatctatattagaatcaatatgtcaattaaatgagatagaatttcgacgtaaaaaaatacatggattgcatccagaacaaagtgcatctatatattttagaaattatttaattggtagtattggagcaattgatccaaggttagaaaaagcattaaatgtatctagcactacatttttatttgaaatatcattaaataatttttcagatattaaaccattaaaagttgaagagatttcaaaatttccaactgttcgacgcgatattgcaatattaatatcagaagaaatcgcagcttataatgttatagagcagtgtaaaatattttttataaatgaaaaagtagaaattaatttatttgatatatatgcttataaagaatcgcataatcataagaaaagtttgggtattagttttatttttcaaaataaaaaaagaacttttcaagataatgaaattaatttaatgatagatgattgtataggagtactacagaaaaaatttcaagccgttttaaggaaataaacctatggtgcttacaaaagctgctatttcagaaaatttatttgagaaattgcaattaactaaaaaagaatcaaaagaattcgtggaatttttttttgaagaagttaggaaatctctagaaaaaggagaagctgttaaactatctggatttggaaattttcaaataaagaaaaaaaaagctcgtcctggtagaaaccctagaacaggagaaatttttcttataacagctagacgagtagttacttttaaagccggtcaaaaactaaaaaataaaattaacaattatttaataaaaaaaaataacaatttctaattgtattagaataattttttctttttaaaaagaagtaaagcatgcaactttctgatttttcttttgatttgccaaaatcacttatatcttttcatccttattttattcgtagtacatgtcgtttaatggttatgtatggacataccggaatgatattccataaacgatttttcaatattattgatgaaattaactctggtgatctaattattttaaataatactcaagtgattccagctcgtttttttggaaaaaaagaaagcggaggtaaagttgaagttttggttgaaaaaatattaggtattaataatatattggcaagtattaaaaattctaaaaatatcaatattggcagtaaaattttttttggatataaagacaaaattaaaggttctgttgtggattgtaaaaattctttttttgaaattttttttcatgacaatattgattcagctattgatattattaataatataggcgaaattcctctgcctccttatattaaaagatttcgaaataaactggatgttgatttatatcaaactgtatataaaaaaaaaacaggttctattgctgcacctactgctggattgcattttgacttacctttgttagaggcattacacaataaaggtgtagatatagattatataactcttcatataggttctggtacatttcaacctattagaagagttcaaatcgaagaacatattatgcattctgaatcagttgaagtgtcttcctcagttattcaaaagatcaaatcttgcaaaaaaaaaggtggtcgtattattgcagttggtacaagtacacttcgtgctctagaaagtgcatatcactcttctgaatggagtgatagccaagattttattagtgatactaatatttttatatatcctggttataaacataatattgtcgatgcattaattactaattttcattttcctgaatcaaccttaattatgctggtttgttcttttctagggtataaaaatacaatgaatgcttacaatacagcaatagtaaataaatatagtttttttagttatggtgatgctatgtatatcactcataataaattagctccctatgaaaattttataatctagtatgctttaaaaaaaaatataaaaaaggataactgaaaaaatgaattttaaagttttatatcaggataacaatgctagatgtggtgtatttaattttaaccaagaaataatagaaacacctgtttttatgccagtaggtacttatggtgctgtgaagagtatcagtacagaagaaattaaaaataccggaagcagaattattttatccaatgcgtttcatttatattttcgacctgggcttgaaataataaaattacatggcaacttgcataattttatgaattggtcaggacctattcttactgattctggaggatttcaagtttttagtctttcacgattttgcaaagtaaatgaagaaggagttatttttcagaatcatattgatggaaaaaaaacttttttaactcctaaaatttctatgaaaattcaatcagatttaggttctaatattgttatgatttttgatcaatgtattgaatataatcaaaattgggaaaaaacaaaaaacgcaatggaaagatcactatattgggctaaaaaaagtcgtatatattttgattcttataaaaataaaaattcattatttggtattattcatggaggtatatatccatccttacgtgatatatcattacaagaattaattaaaattgattttgatggatatgcattaggtggtctagctgttggagaaccaaaaatagaaatgtataaattattagatcatatttgtcctcaaatacccaaaaataaacctcgatacttaatgggagtaggaaaaccagaagatttaatagaaggagtaagacgaggtgtggatatgtttgattgtgttatacctactcgaaatgctagaaatggacatttatttgttactaatggtgtaattaaaattagaaataaaaaatataaaaaggatttatcttgtttagataatacttgtgtttgttacacttgtcgatattatagtcggtcttatttacatcacttagatgcttgtaatgaaattttaggagcacgtttaaatacaatacataatttgcattattatcaaacattgatgtctaatataagaaattcaataaaaaataatacatttgagcaattttcagtgaacttttacaaacaaaaaaataaaattgatttttaaaaagatagtttacaggagaaatatatgagtttttttattcaaaatgctaatgctgtagtaaatggaacatcggaaagcagtaattcatattcattaatatttatggctgtaatatttttattgattttttattttatgcttttccgtcctcaacaaaagaaagacaaagaacataaaaatcttatcaattctcttgttcagggagatgaagttataacaactagtggtttattgggacgaataaaaaaaattacaaaaaatggatatattttacttgaattaaacgagaccactgaagtatttataaaacaagattttatagtatcattgttacctaaaggtactttgaaatctttataatttttttaaaaaataatgtatatatgacaatttttttatttttatgtctatttagtataaataagaaaaatctgctattttaaaaaaaattttttttaatttacttagtaaaagcaatcgatttaaccgtattttagaatcagaatgatatattttaactttcttaaaaaaattatatatgggattttcaaaactttttatttttattaaaatatcattatattttttttctaaaaataaattttttgtataattatcaaattcttctatattattaaataatatgatttcttctttttcaatcattagttttttattaatatctccattaattttttctttttcttttgctaaaatgttagatattcttttaatagacaatattattgattgtgaatcttttaattttttaaaaaaagatatagcttgtatttttttatgaatatctattagttcgattgatttacatgacaatactgatttaataatttttgcactatatcctgtttcttcataccagtgaaatagtcttatcataaaaaatttgatcattttgtcaaataagattaaatcatcttcattttttttgttatatagagaaagactttttttaatcaaatcttctagatttaatggtatattcttttctaaaataatacgtattattcctatagctaaacgtctcaatgcaaatggatctttatctgaacttggaatgtttcctatataaaacattcctgataaagtatccattttatcagcaattgataatccacaacctataggagtacacgggagtttatctcctgaaaacctgggtaaatattgttcttcaagagcagtagcaacatcttttttttctttgtcttctagagcataatacatgcctattttaccttgtaattctggaaattcacatactacatcagttacaagatcacatttagataaaagtgcagctcttattgaatcttctacatcactagaactatatttagcaatccattttataagtaatttaatacgtaatgttttttcatataacgaaccaagattgttttggaataaaacttttttaagagataaaagacgagattctaattttacttttctatcgttcttaaaaaaaaattcagcatctgaaagtcgtgcatgcattactctttgatttcctataataattttttctgattcttgtgtttgaatattagagataaaaataaaatatggcagaagttttttttcagaattatatattggaaaacatttttgttttttttctatggtatttattagtatttttttaggaatttgaagaaatttttcttgaaaatttactaaaagtgcttttggcgattctactaaagctgttacttcttctattaatacgttatttttttttataaatcctttaattttttttgcaatattttcaatatcttctataattttttcttttctaatgaaatagtcagcaatgatattatttttttcaagaagaattttagggtaatcttttgcatcttttatttttatttgactatcttttgaagaaagatgattttgaagaaggtttttagacgtaatattaaatacatctcctggaataacttttttgtccaataaaatcacaatgttacgaataggacgagaaaacttctgattatcttgtccccatctcatagattttttaatagaaatatttttaagagcagattcagtgattttgggaattaatgattcaatgttttcctgtttttttcttgttttataaaacaaccattcacctttttcatttttcaaacgtatagcttgatttatattgattccacaatgtttcaaccaacgtgtagctgcttctgttaaaaatccatctttatcataagaatttattattgatggacctcttttttttatttctacaaacctctctgttatatcaatatctttaatttttaatgcaagtcttcttggtgtagaaaaatatttaatgtttttgtatgaaatattatgaaaatctaattctttaataaagtttttataaaaatataaagatatttttgaaagcagtctagcaggtagttcttcagtccctatttcaattaataatattttctttgtcatgtatttctctttttttatgacacaacggaaagcctaaattttttcttaaatttaaatattttattgcaacttgagaagttaattttcgaatgcgtaaaatataactttgacgttcatttgaagataaagattttcttgcatctaataaattaaatatgtggtttgcttgcagtattttttcatatgatactaataataatggttcttttaaatttattaatttttttgcttctagttcatactttttaaaacaatcaaataaaaaattaacatcagaatattgaaaattatactgtgattgttctctttcattttgttgaaaaatatcgccataagttatttttttatggttatattcattccaaataagatcatatacattcgacttgttttgcatgtgcatagctattctttctaaaccatatgttatttctacactgacaggcttgcattctaatccacctacttgttggaaataagtaaattgagtgatttccatcccatttaaccaaacttcccaaccaataccccacgcacctaaagtaggattttcccagttatcttctacaaaacgtatatcatgtattttttcatctatatttaataaatataatgaatttagataaatattttgaatattatttggaggaggttttataataacttgaaattggtaataatgttgcaaacgattaggattttctccgtatctcccgtcagaaggacgacgacaagattgtatatatgcagcattaataggttctggtccaatcgttcctaaaaaagtaatattgtgaaacgtacctgctcctattggtagatctaatggttgaaaaatagtacatccttgctgcaaccagtattcttgtaaaattgtaattaacttatgaaagttattatgataatttttcattaaaaatccagacagaatattgaaaaacatactttataaatttaaaatttttagtactattaaaaaatattttttcactttataagaataattcttaatttagtgaagtatgtctttttttaaagcattttttctttaaaaaaaagattaagaaatcttatattaaaagaatacaatgatataaatgaaaaagaaagaaaattattaacgaagaaatatatgaaactaattataatacttttaattcatttcaataattattctttcataaataaaatagtttttatatacaaaatagtattttgtaaaattgctattgtgggtgatgtaatatagtacaataaaaattattatagttagcaatatattattaactatttttaataaatattattatgtaagtcaaaccattctatcgttatatgataagaaaaaattaattcccgtgtattgccaatttttttatgaattttttataaaaaacaatgaattaaaaatattcactttatttttattgattaaaatatattttctcagtatcatattatttttaatataaaaaatttatttttttcattagaaataaaaataattttgactaatattcatatttttctatcatgttattctgttttattttttaagtttcttcaaaaatattacaatataagtttttttataggaaaaaataaaaatgaactatattggtgcacatgttagttcttctgggggtttagaaaaaacagtattacgtgccattcaaataaaagcaacagctttttctttttttactaaaaaccagcgtcaatggttctctcctccattgattcaaaaaaaaatagatcaatttaaagcaatgtgcatcaaatacagctttcaaccccaacaaattttacctcatagtagttatttgattaatttaggtcatcctattgatgaattactaagaaaatctagaaaatcttttattgatgaaatgattcgttgtagtcaactcggtttaatttttttaaattttcatcctggtagtcatctaaacaaaatcactgaaaacgcttgtttgttaagggtttctgattctattaatatagctttagagaaaactcaaaatgtaattgcagttatagaaaatacagctggacaagggactaatataggatattgttttgaacatttatctgaaattattaaaaatattgacgataaatctagagtcggagtatgtattgatacttgtcatctatttgcatcaggatatgatttacgtactaagaaagactgtgaaaatacatttgaaaaatttaatagtttaataggtttaaaatatttaaaaggaatacatttaaatgattccaagaaaaaaattaatagtcgtgttgatcgtcatgaaagtttaggattaggtgaaattggaacagcagcttttacatggattataaaaaatgaaaatttttctaatattccaattattttagaaacagcaaaccctatgatatgggaagaagaaattgattggttgagatctcaaaaaaaattataattaaaaaatttaatacattttaagaggcttaaatatgttaacacttcaagcagaaacaagaaaagaaaaaggtactggatttagtagacgactacgtattcataataaatttccagcagtcttatatggagtcaaaaaaactgaaattttacttatattagatcataacaccacctttaatttacaaaaaaagatagaattttataaagaaaatttgctattgtgtgttcaggataaaaaatataaagttaaagtgcaagccattcagcgacattcgtttaaatcaaaattattacatattgattttttgtatgtcgaataggtacaattaatattattattgtaatcgcacttatttttttaagaaatatattcttttctaatttttttattatgttcctaacaatatagtagagaaaatttctctaaaaattaacattgtaggatgaaattgtatcgcaatcaaacttaaaattccagaggacatagttaaaattgctaaccatcctattttcttcttagtgaaaaaagaagttctattatctatatgattttttctcattttccaccattttgatattagccatattcctagccatattaaaattgaaataagtaataacaaccatttaaaataataactttgagaactttcaggtatttttatagcgatacctgtgactataccaggaaaaaaatatactggaggccataatatacacccaataatactaggaaagacaaatttttttaatgggagttttaacattccagaaaccattggaattaaaggtcttgttggtcctataaatcgtccgagaataatagtcagcatgctatgtttatctaaaaaagatttagttttatcgagtaatttttggttttttttcaaaaaattaaaattatatagccaattcttaaaatacaacccgatataatatgatatccaatctcctaataaacatcctgttgtaccagatatccaagcgggataaaatgataattttccatcaccgataaatgttcctaatgtagtcattaaaataataccaggaagcaataatcctactaatgcaagagattctaaaaaagaaacgatgccaactaccaagagagagtatactaatgactgtgttataaaagatgttaaccaagattccataaattctcattattttataggtttttttatattaaaactaaatttttacgtaaatattttatactttatattttttttaaaacaacctcaagaaaatattttaaatttattttttttaatcctttggaaataaattataaaaatattttagtgttaaacaccttatttataaaaagaagaatttgaatgaaaatatgtatttttatatttttttatatttttagtagtattttttatgttttagctaaaaataatcaagtagacaatattacagctattgtgaacgatgaaatcatattaaatagcgatgtaaatgaaattcttgtttttttaaaaaaatcaaagaaaaagtttataattcctctaaaaagtgattttttaaaagaaaaagtccttgaaaaattaattgtagattctttaatattacaagaagcaaatagtaagaatattaatataactaaagaacaaattgacactgtaatcaaaaatattgctttgaaaaaacatattagtgttgatcactttaaaaaacagattttattacgaaatattaaaaatccttcttattatgacaatttcataaaaaaaatagaaatattattaaaaatgaaaacaattcaagattacgaattgcacaaacgtattaatatttcggaacaagaagttaacactatttttaaaaaacttataaaagacaatgaaaaatttaaaaagataaatttaagctatattttacttccttctttaaaacaagattctgataatgcagttagaaatagaacaaaaatagcagaaaatatcgtatataaactaaagaaaggttacgattttgaaaaattgttaatagagtgtgaaaaaaataaatctacttttatagtaaagaaaatgttttggaaacctcttttagatatacaaaatagtttttttaaaactttaaatatttttaaaaaaggacagattttaggacctattgttggagataaaggactttatattttaaaagttaatgatattcatcataaaaaagaaaatatcgtcactgaattttacatgcaacattgtttgataaaaccttctgtgattcttacaaacacagaagcaaagaaaaagatttttaatatatatgaaaatatcaaaaaaggaatttatacttttgatgatgcagtcaaaaatttatctgatgattattattcatctaacaaaaaaggtgatttgggatggatttcaaaagaatcattgggttttgatttaaataagaaatttttaattttagataaaaatgaaataagcgagcctgttaagtctaattggggatggcatatatttaaaatattagatcgacgtcaagtagatgcattttataaattaaaaaaaaaccaagcttttaatattgtattaaaccaaaaaataatatcggaaaaaaatcattggatagaagatctgaaaaatactgcttatatagaaattataagatcataaatatctttttttttaaaatatttaaatatttaataattaactataaatttatgatgccaaaaaattttaaaaaacatttgcctctaaaaaaatacggacaaaattttcttataaataaagataccattaaaaatattattaaaattattgatcctaagacaacagaaacattagtcgaaattggtccaggattggctgcattaactaaacccatgtgtgaattgttagaagaattaattgttattgaaatagatcaggatttattgtttttattaaaaaaacgttctttttactcaaaattgatagttttttatcaaaatgctttaaattttaattttttaaatttatttcataaaaaaaaacaattaattcgtatttttggaaatttgccatataatatttccacgtctttgattatttttttattcaaacaaatcaaagttattcaagatatgaattttatgttgcagaaagaagttgccgaaagattaatttctacccctgggaataaatcttatggtcgtttaagtattatatcccaatattactgtgatattaaaatattattaaacgtttcacctgaagattttcgacctatccctaaagtacattctgtttttattaacttaaaacctcatactaattctccttattttgtttataatgtgaatattctaagtgctattacaaaagatgcctttcaaaatagaagaaaaatattacgtcatagtttgaaaaatttattttctgaaaaagaattaattaaattagaaattaattccaatttacgagctgaaaatgtttctgtgtcacattattgtaaattagctaattatttgtataaaaaatcgaataatcttttaaaaattaattaaattattttttaaaattttacatttatttatagagatcataatatatgagtacttattttataagtgatatacatggttgctacgaagaatttagaattcttttagaaaaatcatcttttaatgataaaaaagattatttatggatcgcaggtgatttagtttctaggggtccagactctcttaaagttgtaaaatatctttattcattaaaagatagagtacaaatagttttagggaatcatgatataaatttaattgctgtacatgctggtataaaagataataaaaaagaaaattattttgatgaatttttatcttcaccggatagcgtggagctcataaattggctgcgctgtcaatcttttttaaaagttgatgagaaacgaaaaattattatgtcacatgctggaattagtccacaatgggatattaatatagcaaaagtttgtgcattagaaattgaagatcgcttgtctcataaaaattatgctttatttctaaaagaaatatatcataataatatagatttttggagattgaacttaaatcaattagatagactacgatattccatgaattcttttacaagaatgagatattgttatcctgatggtcgattaaatatgttttgtaaaaaatctcctgattttgtaaaatacccgttacgcccatggtttttaatgccatccagtatttctaaagtttattctattttttttggacactggtcttctttaaaaggaactcatgtacctaaaccttttttcccattagatgctggttgttgttggggtgaagaattagttatgttgcgatgggaagatggaaaatggttttcgcaagcttatttatcaaaaaaatgcatataagaaattgatgttttaaaattattgttttatcttgataaaatttcaaatgaataattgtatggattcattttatttttggtatttttttttctaaataatgttttccaatatggatataacttatattcaggaaaataagcatcaccaacaatatcaatatctatatgagttaaatataatttattagcataaaatagcatttctttatatattttagcaccaccaataatcataatttcttgattgtattgtgcagatataattgcattagatattgaatcagcccaaataataccctcttgtttgatttcattgctactaataactatgtttttacgcattggtaagggtttttttttaatagactcccaagttaatcgacccataattatgtttttattaatcgttttttgtttaaaccattttaaatcttctggaagataccaaggtattttatttttatatccgataactaaatttttagatatagcagcaattaaacttatattcatgtgaatatagagaacatcccttcatataaattataaatatgtttcacaacatatttataaaaattgtttgttatttaagtatcagtcaattattttttcgtataaaataattgtatttttttatgtattttttgtaaagtttcaatattttttattggattttcatttagtgccataacagttgcaaaagcaccattaactgtcgtatcatagtgtactttatattgtagagcactgcgacatattaattttgaatcttttatgccttgatagcaagatgtagtattaacaatataagaatattctccgttttttaaacgatcttgtatatggggacgtccttcatgtactttattaactaatctagatgaaatgccagatttttttaaagctacagaagtacctttagtggcgtctattttaaaaccgagtttttttaattttactgctaagttaataatgttatttttatcattatttcttacagacagaagaacacgacctgattttttcatattagtatgtgctcctaacatagatttagaaaatgcttctgaaaagttttttccaattcccatgacttctccagtagaacgcatttctggacctagtataggatcaacaccttgaaatttatcaaatggaagaactgcttcttttactgaaaaataaggaggaattatttctttaataaaaccttgttctaatagtgttttaccacacattacacgtacagaaatttttgctaatgcaagacctattgcttttgagacaaacggcactgtacgtgcagctcttggatttacttcaatgatatagattttattatttttaatagcgaattgtatattcattagtccttttacagataattcaaaagctagcttttttacttgtcttctaatttcattttgcactttactagtaagagtatatgcaggtaatgagcatgcagaatcgccagaatgaactccagcctgttcaatgtgctccattataccaccaattaaaacagtttctccatcacagatggcatcaacatcaacttctgttgcatagtctagatattgatctaataaaataggtgttgtattgttcttttttagtgttgttttaaagtaattttctaaaccatacggttcataaacaatttccattgctcttccacctaaaacataagatggtcgtaccattattggatagccaattatatcagcttttttataagcttcatctaaagtcaagacagttgcgtttaaaggttgttgtaatcttaatttattaacagttttttggaaacgataacgattttctgctgtgtcaatcgaatctggactggttcctattataggaacaccttctttttcaaattcatgcgctaattttaatggggtttgacctccatattgaatgataactccttttggtttttctattctgactatttctaaaacgttttctaatgtaattggttcaaagtataatctatctgaaatatcataatcggtagatactgtttctggattacagttaaccataattgcttcaaaaccatcttctcgtaaagcttgagccgcgtgtacacagcaatagtcaaactctataccttgtcctattctattaggaccaccacctaatatgattatttttttattatttttacttggatgagactcacattcatcttcccatgttgaatacatatatgctgtttcggtagaaaattcagctgaacatgtatcaattcttttataaacaggatgcaaattaagtttataacgtagttgtcttatttcactttcatttttattagtaagtattgcaatacgttggtcagaaaaaccttttctttttagaaaataaaaaaagtcgtattttaagccaataaatccattttttataatttttttctctaagagaataatttctttgatttgaacaagaaaccatggatcaatcgatgttaaatcaaatacatcgtttatagacataccatatcgaaatgcatcacctatataccaaatacgttcagaacctgcatcttttaattcgcgtctaattttaattaaatattctgaatcgcgagaagatattttagagtcaaaaccactagcgccgacttctaaaccacgaatagctttttgtatagattcttggaaagtacgacctatcgccataacttctccgacagatttcatttgtgtagttaatctatcatcgcatccaggaaatttttcaaaattaaatctaggaatctttgttactatgtaatctattgatggttcaaatgatgcagtagtatttgttccggtgatatcatttgcaagttcatctaatgtatacccgatagctaatttagctgcaatttttgcaatcgggaatcctgttgctttagacgctagagcggaagaacgagaaactctaggattcatttcaataacaatcattcgaccatttttgggattgattgcaaattgcacgttagaaccgcctgtttctacacctatttcacgtaaaattgacatagatgcatttctcatgacttgatattctttgtcagtaagagtttgcgcaggtgctacagtaatcgagtcgcctgtgtgaatacccatagggtctaaattttcaattgaacatacgataatgcaattgtcatttttatctcgaacaacttccatttcatattctttccaaccaattagcgattcatcaattagaagttctgtacttggagataattcaagtcctctttcacatattttttcaaattcttcatgattataagcaattccccctccatgtccacccatggtaaaagacggacgaataatacatggaaaacctacgttatttaaaaccaaaaatgcttcttgaatgttatgtgcgataccacatttcgcagtttctaaatttaacttcttcattgaatgttcaaataattttctattttcagctttttttattgcgtctactgttgcacctatgatttgaacaccatatttttttaaaatacctttatgatctaattctaaagcacagtttaaagctgtttgacctcccatagtcggaagtagtgcgtctggtttttctttttggataattttttctactatttcccaatggatcggctcgacatatgtagcatcagccatatcaggatctgtcataatagtagcgggattggaatttagaagaataattctataaccttcttcttttaaagctttacaagcttgtgtacctgaatagtcaaattcacaggcttgtccaattactattggacctgccccaagaattaaaattgattttatatcagtagatttaggcattttttttccctaattaattactgagtgtagttttttgagaaacgattaatttaatgaaataatcaaacaaatatgaagcatcatgtggtccgggacttgcttctggatgaccttgaaaactaaaagctgatttattagttaaggatagtccttgtaatgttccatcgaaaagcgaactatgtgtaatttctatattattgggtaagttttcagtatctacagtaaaactgtgattttgagatgttataattactcggttgtttttaatatccttaacaggatggttgcctccatgatgcccaaatttcattttaacaattttagctccactagctaaggcaagtagctgatgtcctaaacatatcccaaaaataggaatattagtttttaagaaatattgaattgcatgaatagcgtaatcgcaaggtctcgggtcacctggtccattagataaaaaaataccgtctggagataaatttaatacagttttaggatcagttatagctgggacgaccgttaaataacagcctctatctacaagcatacgaagtatatttctttttactccaaaatcataaacaacgacatgaaataaaaatttttgtttgtttatagaaaaaaaattattttttttaaaagtaaaactaccttgatcccaattataaatagatttagtggatactttttttgctaaatctaaatcttgtaaactaataaaatttttagctttgttatatgctatagaataattttgttttttatcttctataatacatccattttgtgaacctttggtacgcaaaatacgtgttaattttcttgtatcaatatccgatattgcaataatattgttttcttttaaataggaagaaaaactttttttatttcggtaattacttgcagtgagtgataaatcacggataataagacctttaatgtaaattttggatgattcttcatcattagaattagtaccaacattaccaatatgaggatgagttaatgtcacaatttgatgtgaataagaaggatcagttattatttcttgataaccagtgattgatgtattaaaaacaacttcgcctacagttattcctttagctccaatagctcgtccatgaaatttagtcccatcttctaaaaccagtactgctaattggctcaaaacaccctccattaaaaacactttttttatatgtgagtttttgttactattgtattaattacattttatcttaactaaaattaatatttttgtctattatcatgatatacatttgcaagttcttaaaaattatatttttctatctaatataaaatacattttaattataaccatgtatggtaactaaaaaatattaactagattattttttttagtcctaattacaatgatagtacatctgtcatatcaaataaacccgtattttttttatgaatccatagagctgattgtatagcacctcgagcaaaagacattctattagacgcagtatgagtaatttttatttcttcatcataactagaaaacatcacagtatgtttcccaacaatattaccggcgcgtacaatagaaaatccaattttttttgcatctctaattccagttattcctttttgataatatatagaatcttgatttaaattccaattcattacttttgatattacttctccaatctccaaagctgtacctgaaggagcatctattttattacgatgatgatattcaagaatgttaatatccgaatcttttcctataatttgagtggtttttttgattaattgaaacagcaaattaataccaatactaaaatttgatgctataattatagcaattttttgagaatatgatttgataatatcaatttcttcttttgaaaatcctgtagtaccaataacaatattttttttgaatttattacaatatttcaagtattctagtgtgcctgcaggcctagtaaaatcaattaaaacatcaaagtcatttttttttatatttaactcatcgctaataagaacacctatttctcctattccaataattcggccgatatcttgaccaattaattgatgttttttttggaccactgcaactgttaaatgtgagtgtttattgttttgtatttctttaataagcatacgacccatacgaccaatgggaccagtaattgctatacgggtttttttgttcatgttttatccgttttcatctaaaattgttttaatatttaataattttttaggaattttaaaaatttttttttctctaacacctatcatttctattggtttatgagcacctattttccttaaatattgaattacttctgtaactaatatctctggtgctgaagcaccagccgtaatacctatataatttacattttttagccatttttttttaatatcaagaaaagaactaataagtttagtaaatgttccagtttcttttcctaattctgcaagacgattagaattagaagaattatttgatcctattacaaatattatatcagcaattttagataattgacgaaccgctatttgacgattagttgtggcataacatatatcttctttattgggaccagaaatttctggaaatttattttttaaagcagcaataattttttttgtatttgtaatagataaagttgtttgtgtaaaaaaatttaattttttactattttggacagataaattatgtacatcttctatagactcaacgagatatatttttccatttttattattatattgccctatcgttccttctacttcaggatgtcctctatgaccaataagaattgtttctattgctttttcactagattttgagacttctatatgtactttttctactagtggacaagtagcatctaatataattaatttttttttcacagcttcttgtacaactttttttgatacaccatgtgcagaaaaaataactactgaatagtctggaatttgttcaattttttcaacaaaaacaactcctttttgacgcagtgtgttaataacatattgattgtgtactagttcatgcctaatataaattgtttttttataaacttttaatgcattttcaactattaaaattgctcttttaacaccagcacaaaaacctcgaggattagttaatatgatgttcattacataatctccaaaccatttatattaataataattgaatattatataaaaaccatttaactttttatgttgagtaatttattcgcataagtataataattccaataaatatactacaatcagctatattaaatgtagcaaaatgccaatcattaatatgtatgtcaataaaatctactacgaatccgtaaaaaattcggtctattaagttgcccgttgcacctgcaataattaaagaataagcagttattttttttgtttcttgtttttttaatttagtaataattcttgtcattactagtatagtcagtatgctaacagttgataaaaaccatttttgccacccgttttgatcagataaaaaactaaatgctgcaccgtgattatgtacatgaaaaaaatttaacaccgaaaaaattttttttgtgtcataagtttttatatattttatgatcaagcgtttactggatatatcgagaataagaataaaaattattgtggttatataaatccatttttttgattttttagaatatttctgtttcattatatgaatatacgtttttcgccatttcctatagtatttaaaatacaacgattacaaatatcactattttttatattttttttagtaaaattaaagtagtgccaacatcgcggacatttttttcctttaattttttctaaagaaactttcaaataagggacgattttgcttttttttgcatttttaggtgctgtatcatataacttaatttgtatatctgatgttaaaaagatgaattttgtttcttgttctaatatttttaatttatttgataattcatgtgaaacatatagaataatagaagtttcaagtgaattattgatagttttattttgtattgcttcttctaaaaatttattaatttcatgtttaattgtaattatttcattccaaaattgataattaaataagtcatcttgatctaaataaaataatttgtcaaaccactcttccataaatacatattgagaattattttctggtaaatagctccatatttcatctgcagtaaaagatagaattggagctatccatcgtacaagagaattaatgatataatatatagctgtttgagaactacgtctttcctgactatgtttttttaaagtatattgcctgtcttttatgatatcaagataaaaagaacccatttctattgaacaaaaatacattaaacgttgtattaccgcatgaaagttataattattataatgttgaataatttcttcttgaactattttagtttgtcctatagcccacttatctaaaagaaccatattttctttagatattatattttttttaggatcaaaatcactgatattagctaacataaaacgagccgtgtttctaattcttctgtatatatctgacgaactctttaatatttcattagaaatcgaaatatcattagaataattagaagatgcaacccatagtcttaagatatcagctcctaatgtatcaactatttcattaggacttatagtattacctatagatttagacattttttgtccttttccatcaacaacaaatccatgagttaatacttcagaatatggttttttttcactgattaaagttgatattattagtgaagacatgaaccaacctcgatgttgatcagatccttctaaaaacatatctgcattttttttagtataatttttgttcttgtagtttattgtagtatgtgtatttcccgattcaaaccacacatctaatatatctaaaattttttcatatgattgatattcttcacctagtatttcttttgaatctatattccaccatacctgtagtccttctaattctactttttttgctatttttttcataaaaacaaaagtattagggtgtatctttcttgtattcttatgtataaagatagacattggaactccccattttctttgtctcgaaatacaccaatctggtctttttttaatcatttctcctattcttgattctccccattcaggtatccatcgtactttttttatttcttgtaataatttaatacgtaattgtttctgatcgatatctatgaaccattgtggagtggctctatatatcaccggactcttatgtctccaacaatgtgggtaactatgtatgagagattcatgatgaaagaatgtattatttttaattaatagttctataataattgaattagcttctaaaacattaacaccgtctaatttgtcatgtgtattagagatgtattcccctttaaaatttactatattacttgttttaatattatatttttgactaataatataatcctctaatccatgatctggtgccgtatgaacagctcctgttcctgattcaagagttacatgttttcctaaaattacaggcaaatcaatattttttaaaaatggatgcaaacatatcattttttctaaaaatcttccttttacataatttcttattattgatttttttatttttagtgtgtttaacgtcttttcaactaactcttttgctatgattaaatagcatctttcagtttctattaattggtactgaaaatctggatgtattgaaatagctttactagaagggagagtccatggtgttgttgtccagattagtagatgaatttcttttttgttagaaatttgaaaatcaaataatttttctataattgatttatatttaaatttaaaaccaactataatagaatctgatttttttttagagtattcaatttcagcttcagatagtgatgatgcacatttaaggcaccaatgtatgggtttaaaatcttgatataaatgttttttttgtacaattttcgataaggtcttaattatattagcttcatttttaaagttcattgttagatggggattatcccaatcacctattacccctaatctaataaaatcttttttttgtttttcaacttgatcttgcgcatattttctacatttttcttgaaattctgtagtcgatatttccccttgattagacttgattttttcctcaactttctgttcaattggcaagccgtgacaatcccaagagggaatataaggtgcatcaaaacctgacatatttttagattttataataatatcctttaaaattttatttactgcatgtccgatgtgaatgttcccattagcatatggtggcccatcatgaagaaagaatatttttttttcttggtttttttttcgaattaatttatataaattattttcgttccaactttttaatatatttggttctttttttgaaagatttcctctcatagaaaatagtgttttaggtaaatttaaagtgtctttataatcatccattctgttctcttttttattaatttttatgaatgttaaaatatttttgaactattaaaatatcttgtgatatttgattttttaattctttttttgaaggaaaaaattgttcatcccgtatttttttatatataaaaatttctatatattttccgtataaatcaatttttatgtcaaacaaatacacttcaagtaatttatttttttgagtattggaaaaactaggtttgattccaatattagaaattcctatggcgtatttattcgggcaatattttattttaactgcatatactccattagttaataaaaaatttttacttaaaagtatatttgctgtaggataattcatggttcttcctattttatttccatggattactctgccagatatgctaaatacacgacccaggagaagagaagctaattttatattattttcagataatgcttttctaatattagtactactgatttttatattgtttttatataatggtcgaatttttatgacgttaaattgatatttatatcctagtttttttaatagattgatattgccgtttctttgaaagccaaatctaaaatcatttcctatgactataaattttaagtgtagtttatttattaatatatttatgataaaatcttttgcacttagagattgaaaagatttattaaatttaacacacaatatactatcaaaattgtaggaactaatacgtcttattttctcacggaactttgtaatccgaacaggagcattattttttcttaaaaattctaacggttggggttcaaataaaacaactatagttgataatttatatttttgacctatttgatatatatgtgaaaacaatttttgatgacctaaatgtatcccatcaaaatttccaatagtaacaactgaattagaatttatttccttgatattatgaatacctcgtataatcttcattattaggttgaccttattaaatgaagcaaattacattgaaaaatttttaataaaaaaattttatagttttttttatataatatttcttagtatttttttaaaaaaaaatttttttaatgaaattaaaaattaaaataataatattttttcagtatattcattaatattgttttttcaaataaatgtttaattttttaaaatttagaggtaaaaattggccaatataaaagcatctaaaaaagatgcattaacttctgaaaaacgtcgtaaaaaaaattctagtcgacgttcaatgattcgtacctttgtaaaaaaagtacgagtagcaattatgtctggaaacaaaacaacagcagaagatgcatttaaaaaaatgcaacctattattgatagtcatgtgaataaaggtttgatacataaaaataaagctgcacgctataaatctaatttatcattacaaattaaaaaaatatctaaaatataattttttttagagtattgcctctaatttttagaagcaatacttatagaatcttatcttgtcagatcatcaaaaaatcttttaacaccatcaaaaaatctttttgaacgaggactatttttttcgccgcgaaaaccgtgaaaactattacctaattcatgcaaaaggtttttttgttgttcattaagatttacaggggtttcgactacaacacgacataatagatcaccttgatttctattttgtactgattttactcctcttccacgaatacgaaaaagttttcctgattgtgtctcatatggtatttttagtttaactctaccgtctagagtaggcacctctatttctccacctagtgctgccattgtaaaatttatcggtacttcacagtatagattgtttccttctctttcaaaaataggatgttttttgactgtaatttgaacataaagatctcctgattgtgcgccattagcacctgcttctccttcattattcaaacgaatacgatcattggtatctagacctggtggaatttttactgataatattttatatgtttcaacacgcccttgtccatgacataaattgcacggatcagtaattattgtccccttaccatggcatgtaggacatgattgttgtactgtaaaaaaaccttttctaatatgtatttgtcctttgccgtgacatgtagaacatgaacgaggtttagtacccgttcttgtaccacttccgtaacatgttttacatttttgaagcgttggaatttgaatttctttttttattccttttactgcttcttctaatgtaatttccatattatagcataaatcagctccttttttagctctttgagttctgtttccaccaaaaatatcaccaaaaacatccccaaaaatatcactaaaatctgcggaattagtaaaagtgctgtatgtactattagactgaccattttcaaaagccgcatgtccatattgatcatatgcacttcttttttcttcattaattaaaatttcataagcttcttttatttctttgaattttccttcagcggttttatctccttgattacggtcaggatgatatttcatcgctagttttttatatgcttttttaatttcacgctcttcagccgattttggaatgcctaaaatttgataatagtctttttttgccattctaacttactctacctgatttaaaaataattacacgggcgcagaagtttatctacgcccgtgctagtttaaagtctataataattatctttcaatattttattaaaattgattatttcttcggatctttaatttcttcaaattctgcatctacaacattttcatcttttttattagctgacatattgttgtctttttgatctttttctgattttttttgattgatttctgttagcttagaagatatttttaaaagattttgtatgttcttttcgatatcagacttatcttctccttttaatgcattttctagtttatttagagctaattgaatatcttttttactctcttcttcaattgaatttttattttcatttagttgttttttgatactatgaactagttgatcaccttggtttcttgtttgaattaattcttcaaacttctgatctgcttcagaattagcttctgcatcatttaccatttttttaatttcttcttcatttaatccagaagatgctttaatggtaattttttgttcttttccagtttttttatcttttgcagatacatgtaatattccatcggaatcaatatcaaatgttacttcaatttgtgctgttcctctaggagctggattaatcccgtctaagttaaattgtcccaatgatttattatctgaagatcttttacgttcaccctgaagcacgtgtatagtaactgctgattgattgtcttctgctgttgaaaatatttgactatgtttagtagggatagtggtatttttatttatcagtgatgtcattattccacccatagtttcaattcctagggatagaggagtaacatcaagtaataagacatctttaacatcaccagagagaactcctccctgtactgcagctccaactgctacagcttcatctggatttacatcttttctaggttcttttccaaaaaaatcagcaactttagattgcaccataggcattctagtttgaccaccaactaatatcacatcatttatgtctgttactgataatcctgcatcttttaatgcaacttttagtggctcaattgaacgtaatattaaatcttccactaaagactctaattttgctcgagtaacctttatatttaaatgtttaggtccattggaatctgcagtgatgtatggaagattaacatctgtttgttgtgcggatgataattctatttttgctttttccgcagattcttttaagcgttgcatggataatgggtcatttcttaaatctattccttgttcttttttaaattctgttactaaataattaattagtctactatcaaaatcttctcctccaagatgtgtatctccatttgtagcaagaacttcaaatgttttttctttatccacttcatcaatctcgatgattgaaatatcaaaggttccaccacctaaatcatatacagctattgttctatttccttttcctttatctaaaccataagctagtgctgcagctgttggttcatttatgattctttttacttctagtcctgctatcctacctgcatctttagttgcttgacgttgagcatcattaaagtaagcaggaaccgtaataactgcttctttaattgtttctcctaaatagtcttctgcagtttttttcattttttttaatacttctgcagaaatttgaggaggtgccattttttgtttttttacatcaatccatgcatcaccattatcagaatttacaatattataaggcatgatttttatatcacgttgtacttcatcatctttaaattttctgccaattaaacgttttatagcaaaaagtgtattctttggattagttatagcttgacgtttagcaggttgtcctactaaaacttctccttcttgagtatatgcaataattgacggtgtagtacgatcaccttccgcattctctaaaacacgtggtttattgccatccataatggcaacacaagagttggttgttcccaagtcaataccaataattttacccattaaagtttctcctatttaatattttgataaattgggttttttgcaacctttatgcggccacttttttggcttttaattagttacataagttttatcatactttgcatctgaaatgtttaatgattattagatggggtcgctttttcgctcatcaaggggcagtagaaaaaaaaataaagttttaccaaactataactgaaaattataagttttttatttattaaaaataacatattcgttaatatatttaataacatagtttttttatatatttatatatataaacaatctatatttaatgctatagatatttttaaattttcaggggtaattaatgttaataaatactgaagcagttaatgaatacttatccttttttatgtttatatttttttctttaggattatgtttttttatgctttgtttaagttggattttaggaggcaggtcttcttctcgatataaaaataccccttttgagtcagggattgtatcatccggtaatactaatctttatttttctgtaaaattttatttaattgctatgtttttcgttgtatttgatgttgaagcactatatttatatgcttggtctgtcagtataaaagaatctggatggataggatttagcgaagccttaatgtttggaatatctcttttattaggattgttctatttagttcgtattcgagcattaaactggtcatcttcagttaaaaataatattcaactattttaacatataatatgttttaccttaatgaggcataaaatgaattatactttaactaaagcagattctgataacaataataaaaaatatccaaaacaaacgattgagtctgtttcagatcctctagaagaatatttaaaaaagaatatttttatgggtaaaattactcaattattacataaattagttaattggggtcgaaaaaattctttatggccttataattttggtctgtcttgttgttatgtggaaatggtatctgcttttacttccgttcatgatgttgcacgttttggatctgaagtattacgtgcgtctcctagacaagctgatgtcatggtgatagcaggtacgccatttataaaaatggcgcctgttattcagagattatacgatcaaatgttagaaccaaaatgggttatttctatgggagcatgtgccaattctggcggaatgtatgatatctattctgttgttcaaggagtagataaatttttgccggttgatatttatattcctggttgtccacctcgtcctgaagcgtatatgcaagctttaatactgttgcaaaaattgatcaatgaagaaagaaggccgttatcctgggtaattggagaacaaggtgtttatcataaaaagatgccatctgaaagagttcaaaaaagaagcaaaagaattaatattatcaatctttcaacttcagaaaaaatttaataatatatttaaaatatataaatttctttaatattactgattttttagatgataatattattatattttaaactgagtggtgagagatatatgattgatttaatgccaaaaaaaaatacatttttattaaaaaaaaaatataaagaagactcaaataattcagtaattaataatttatttgatttctttggtaaagaattttgttttcatcaaattaccttaaccggttttcctataatttggattgataagacattattaatagaagttggaaaatttttatatcatttatctcaaccttatatcatgctttatgatttacatggcgtagatgaacgtattagattgcatcgagaagatttacctaaagctgatttttccgttttttatcatttaatatctattgaacgcaactctgatattatgattaaagtaccattattagaaaacgatttgatcttgccaacttttactggtttatttcctaatgctaattggtatgaacgtgaaacttgggatatgtttgggattatttttaataatcatcctaatttaactcgtattattatgcctagtacatggaaaggacatccattaagaaaaaattattctgcaagagcaaccgaatacgaacctttcttcttaaatgagcagaaagaagatttagaaatggaaggtttaaaatttaaacctgagttatggggtatgaaacgcaagaacgacaatgtagaatttatgtttctaaatttaggtccaaatcatccttctgctcatggtgcttttagaattgttttacagttagatggtgaaaatattgtagattgtgttccagatattgggtatcatcatcgcggagctgaaaaaatggcagaacggcagtcatggcatagttatattccatatactgatcgcattgaatatctgggtggttgtgtaaatgaacttccttatgttttagctgtagaaaaattagcaaatatttcagttccagaaaaagcagaagtaattagagtaatgatgtcagaattgtttcgtataaatagtcatttattatatatttctacttttattcaagatgtaggttgtatgactccagttttttttgctttcactgatcgtcaaaaaatatatgatttaattgaagcaattacaggtgctcgtatgcatcctgcttggtttcgtattggtggagtagctaatgatttaccacagggttggaatattttattaaaagaatttcttgactggatgccaaaaaggttaaaatactatataaacactgctttaaaaaatagtattttaatccatcgatcaaaaggaattgctgagtataataaaaaagaagcattgcagtggggtgtcactggagcaggtttacgtgctacaggattaaattttgatgtaaggaaatggaggccatattctggatatcaaaattatacttttgaagtaccagtgggttcgggaattagtgattgttattcaagagtaatgattaaagtagaagaaatttatcaaagtctttttattttaaaacaatgtttatgtaatatgccatcaggtccttttaaatctgaagattcattgactacgcctccttctaaagagtgtgttttgcaaaatattgagactatgattactcattttttacaagtgtcttggggtccagtaattccagaaaatgaaagttttcaaatgattgaagcaacaaaaggaattaatagttattacttaattagtgatggtggtacgatgagttatcgtacaagaatacgtacacctagttttccacatttgcaacaaataccttcagttattcgtggcagtttgatatctgatttaattgtatatttaggtagtatcgattttgtaatgtctgacgtggatagataatcatgtataaaaaaaaagtcaaatgcaagaaatttctataaaatttaaattaactaatgaagaaataaatgcaatagaaaatcaaaaaaaatactatgaagattttcgtgctatttctatagaagcgttaaaaattgttcaaaaaaaacgaggttgggtttctgatcaagctatttatgctattgcagaaattctgcatattaaccccagtgatgttgaaggagtcgctactttttatagtcaaatttttcgtaaacctgtgggtcgtaatattattcgttattgtgatagtgtagtttgttttttgacaggttataaaaggattcaaatagctctagaaaattatttaaaaataaagataggagaaacaactaaagacgatagatttactttattaccagtttgttgtttaggaaattgtgataaaggtccaaccatcatgattaatgaagatacatattctgttttaactccagaatccataccaagtttactggaatcatataaatgaatagaattttacgaatttcagaaacgcaccctttaacttggcggttaagagatgatcaaaaaactgtttggattaaagaatattgtgataaaaatggttatttatctttaaagaaagcattaaaagaaatgcttccagaagatgttattaatatagtaaaagaatctggtttaaaaggaagaggaggtgcaggattttctactggattaaaatggagtctaatgtctcaaaaccattcttatacaagagaacgtggttacttaatatgtaatgctgatgaaatggaacctggtacgtataaagatagattattaattgaaaagattcctcatcaattaattgaaggaataatattgtccgcatacgcattaaacgtttctcgtgcttatatttttttaagaggagaatatgttcaagctgagcatattttaaaacaatctatacaggaagcaattaattttggttttattggattaaatatcttaggaagcaattttaatatcgagttagttttacatactggggctggacgatatatttgtggagaagaaactgctttaattaattctttagaaggtcgtagagctaatcctagatcgaagccgccatttccagcagtatttggtttgtggggaaaacctacttgtgtgaataatgttgaaacactgtctaatgttccatgtattatattgaacggtgtaagttggtataaaaatttatctaaaagttctgatacaggtactaaattaatggggttctcaggaaatgtaagaaatcccggtgtttgggaattaccttttggcaccactgctcgtgaaattttagaagattatgctcatggaatgaagtccggtttttctttaaaagcttggcagccaggtggcgcgggaacagatttcttgcttgaagaacatttagacttgccaatggattttaaaaatatcagtcaggctggaagtcgtttaggaactgctctttctatggctgttgataataaaactagcatggtttctcttgtatataatatagaaaaatttttttcacgagaatcatgtggtttgtgtacaccatgtcgagatgggttgccttggattgtaaaaatattaaaaagtttagaacaaaataaaggtcataaaaatgatgtgaaaaacttagaaaaactatgctctcatttaagtccaggaaaaacattttgtgctcatgcgcccggggcaatagaaccattgcaaagtgctattaaatattttcgatctgaatttgaatctggaatcaatataagaaaaagagatttaaataaaaaaattattgggattcaatctaattgtatttaattcaaacattgaaatttttatagaaaatatttattttaaataaatttttttatataaatttatctgaataaaagattttggaattattctcttatggctaagatttatgtagatagtaaaatatataatgttaacgaatcagataatttactgcaagcttgtttatcagtgggtataaatattccttatttttgttggcatcctttattgggaagtttaggtgcatgtcgtcagtgtgctgttacacaatatgataattttcaagatcgtaaaggtcggttaattatgtcttgtatgactcctgtaactgatggagctataatttccatcaaaagtactgaatcagaagtttttagaagtgctattgttgaacttttattaactaatcatccccatgattgtccagtatgtgaagaaggtggtcattgtcatttgcaagatatgaccgttatggtcaaacatagtatgcggaattatagatttaaaaaaagaacacataaaaatcaatatttaggtccttttattaaacatgaaatgaatcgctgtattgcatgttatcgttgtgttcgatattataatgaatatgcagatggtgtagattttggagtttatggttccaataataatgtttattttggtcgtatagaagatggtgtcttagaaagtgaacattctggaaatttaatagaattatgtcctactggagtatttactgataaaactcattctaaaaaatataatcgtaaatgggatatgcaatacgctccaggaatatgccataattgcagtgtcggctgtaatattagtattggagaacgttatggtgaaatacgtcgaatagaaaatagatatcatgaaaatataaatcattatttaatatgcgaccttggtcgttttgggtattcacataccaatttgaatacacgtcctaaaaaacctacatatgttaataagtataatgatcttaatgtattaaattttaatgaagcaataaaaatcggagttgatttttttaaaagatataagcgtgtaattggtgtcggttctgcaagatcaagtatagagaataattttgcattacaagaacttgtaggaaaagagaatttttctaacggaatgtctaacaaagagaaggaatgtatcaaatcgattttagaatttttaaaaaataattatatatatatcccatctttaaaagaaattgaaagttatgatgtaattttagttcttggagaagatttaacacaaacatcttctcgtgttgctttagcagtgcgtcaagcagtgaaaaaaaaagttcaagatataaaaaatttatatggtattccgaaatggaatacatcatctaatattcatatttcagaaaaatttaaaaattctttatatattatgcatacacatgaaagtaaattagatgatatttctgaatggtcttatttcgcttctattgataaacaagttaatttagcatcttctatcgcttatgagatagataaaagttcaccaaaagtttcaaatttagattctgaattaaaagaaaaagtgttgttaatttctgatagattaatttcatctaaaaaaacattaattatttcaggttctcattcttttagtgattctattattaaagcatcaataaatatagctaaagctattaaatttcgcgctcccgatcaccatgttggtgtgactttgttaacgtcatctgttaattctttaggtgcagagttgcttggaggcatgtctatagaatctgcattagatgatcttaaaaaagaaaaagcagatgctgtaatttttatggaatacgatttgtatcgttctgtatctgaatatgactgtgagtatttttttaagaataaagataatataattactctcgatcatcagtacacacaaacttttaaaaaatccatgttatctttaccttcaacaaattttactgaaagttctggaacggtaataaactttgaaggaagagcacagcgtttttttcaagtttatgatcctaatttttatgataaaagtaattgtctatgtgatagttggaaatggttgcatactatcaaatcaaaaattaataatacagaaatatgttggtttaatttagatgatgtaatcaattcctatgctgaaaaatattctatttttaaacaaataaaaacaaacgaattaaattctaatcttcgtatccatggtcaaaaaatttctcggtcacctattcgttctagtggcagaacatctttgcgttctaatatcgatgttcatgaaccttgtcagcctaaagatattaatactatgtttgcattttctatggaaggatacaatcaacctaattcgtctgtatcgaatattccctttgcttggttccccggatggaattcacctcaagcatggaataaatttcaggtagaagtaggtagaaacttaatatctggtgattcaggtatacatatttttaaaaaatatgaaaaaaaaacagatgtatattcaaatatagttttaaaaaattctataaaagaaaaatactggaatataatcccctattatcatctatttggcaatgaagaattaactcaatattcttctataatacaagaaaatactcctttagagtatgctttaattggtttatcagatgccattaagatgggtttgaaaaaagattctatagtagaatttaactgtttaaaaaaagattattgtttgccagttcaagtatctaagtatttaactgaaaaacaaataggtttgcctattggaagaaaaggatttcctcttgcacttgttggtgaaaaaattgaatttttataggaatttattaaatgatttggttagaagagaacatgattaaaataactttttgtttttttaaagttatttttattttattattaatagtattctctagtgctatgttgagtatagttgaacgaagactattagccgtatttcaaaatagatatggccctaatcgagttggttggatggggagtttacaattatgcgctgatatgattaaaattttatttaaagaagattggattcctccttttagcagaaaatttatttttgttttatcaccagtaatagcttttacctctttactgtgtgttattcctattattccttttacatctcattttgttattattgatttaaatatagggattttatttttcttgatgatggccagtttatctgtttatgcaatattatttgcaggttggtcaagtaataataagtatgcattattaggagctatgcgtgcatgtgtgcaaacattaagttatgaagtatttttaggtttatcattaatgggtgtagtcgctcagtcaggatcttttaaaatatctgatattgtcaatagtcaaaaatatatctggaatgtttttccacagttttttggttttttaacttttctcatagccggtttagcagtttgtcatagacatccttttgatcaacctgaatctgaacaagaattagctgatggttatcatattgaatattctgggatgaagtttggtttattttttattggcgaatatatttctattattaccgtttcatcattaatagttacacttttttttggtggttggttaggtccttggattcccagttgtatttggtttattttaaaaattattttttttatttttctttttattttaatccgagcagctttgccaagaccacgatatgatcaagtattattatttggatggaaattttgtttaccattaacattgtttaatttatttttgactgcttttttaattttggtataaattttttaagagatttttttatttatgacattaaaaaatattattattggattttttacacaaatcagaagtatttttatgattggtgcaaatattttttctaaacctgaaactaaattatatccagaagaaaaagtatatcttgcccctcgttatcgaggtcgtatcatattgactcgtaatatagatggacaagaacgttgtgttgcatgtaatttatgtgctgtagtttgtcctgttgattgtatttctttacaaaaatctgaaaaaactgatggtcgttggtatccgaaattttttagaattaatttttctcgttgcatattttgtggtttatgtgaggaggcttgccccacagctgcaatacaattaatgcctgattttgaactatctgatttcaaaagacaagatttggtgtatgaaaaaaaagatttattaatttcaggtccaggtaaatatccaaattatgatttttataacttttccggtgtaactctcaaaggtaaaaaaacaggtgatttagagattcaagctagacctattgatgtaaaagatttattgccataaggagattttatggaatttgttttttatgtgtgttcatttgcagcagtcgtttctactttttttgtaattattcaaaaaaatgcagtgtattccttagtgtatttaataatttctcttttatcaatagctggtgtttttttttcattaggagcattttttgctggttctttagaagtaattatttacgcaggagctattatagtattatttgtttttgttatcatgatgcttaatataagtgataaatataatttagaagaagcacactatttaaaacctaggttttggatcggaccaagtattttatcattaatattacttttatctatgacttatgcaatattttttttaagagataaaaaaatagatggatttttaattgattcaaaaatagtaggtataaatttatttggtccttatgtatttttagttgaactgtcttccattcttttattatctgctttagtcgttatttttcatattggaaccgaaaaaaatgtagataaaaataaagttttgtaattaattgatctttattaagggcaataattcatgatttctttatttcacgggttatttttatcattaatattatttattttaggtttaacatctttaattgtcagacgtaatatattatttatattaattagtttagaaataatgatgaatgctgttggattagcgttaatagtagttggtagttactggcatcaagcagatggtcaaataatgtatatattcgtcataactttagccgcatcagaagccagtatagctttagcattattattacaactttataggcgaaagaaaacattaaatattgatattttaagtgagatgaatggatgagtattatttttttcataattttatttccactaatcgggtttttatttttatctactatacaagattttattttcaaacgatatactttaaatataggtatattttctatatttatatcattttttataacttgtttttatggtgttagtattcttaaaaataataatcaagtttttactcagatactgtggaaatggttatctattaatgagtttaagattgattttggtttttttttagatggactgtctttaagtatgttatttgtaattacaggtgttggattattaatacatattttttcttcttggtatatgagatacaaagaaggccagtcacgtttttttgcatatactaatttatttatagccagtatgtcggttttagtgcttgctgataattttctatttatgtatttaggatgggaaggtgtcagtgtttgttcttatttgctgattgggttttattatactgaattaaaaaataacctttgtgcttttaaagcctttattttaactcgagtttctgatgtcttcttaatgattggaatgtttttaatatatagagaatttaatagttttaatttccaagaaattaaattcttatcaagttttttaaatgtagaaaatttttattatttagattatattacactttttttattattaggagtgattggaaagtcagctcagttacctttacaaacttggttatctgatgctatggttggaccgactcctgtttcagctttgatacatgcagctactatggtaacagcaggtgtatatttaatagcaagaacacattttttatttttactaactcctggaatattatatttagtaggattaatcggtacattgacaatattagtttccagtatttctgccttagtacaaaaggatataaaacgcattttagcctattctacaatgagtcaaataggatatatgtttttagctttaggagttaaagcgtggagtgcggcaattacacatttgattatgcatgccatttttaaagcattactatttttatctgcaggttcattgattaaatcatgtaaaaatgaaaaaaatatatttaaaatgggtggtttacgtaaacaacttccttttttatatattagctttatagttggtggggcatccttagtgtcttttcctttaattacagccggattctatagcaagggtaatattttatttagtgttttaaaaagcgggtgtattgatttttttataatcggtttattttgttcttttttaactgctatttatacattcagaatgatttttgttatttttcatggtaaaaatattcatacagcagactcatctacgaatttacaacataacattccattatttgtgcttttattattgtctactgtatttggttcgtacatatcacctccattatcagatgtatttcctttgtcttataccccaatagatcacaagttcgcatttgaaataatatgcagtatattatctttatcaggaatatatttatcttactatatttggattaaaaatttatatgttctagataaaatttttcagtttaaattcatgagatatttatattatttttttttaaaaggatggggttttaattggttttataaaatatcttttgtatatttttatttatatatatctaagagattatcggctgatccacttaataaaattatcaattattttttaaaagtcacgcagatatttaacttttacttattaaaaactagcaatggttatgtgagatggtacgtagcttcaatgatattaggtattaattttatttttttattaatgttatttttttattttaattaaaaacagtgtgtttattaatatattattattgttttaaaaatataaaataattctgttgattaaatagtcatagtgaataataggaatatacgtgcaatgttactttctttattaattatcatcccatttttgagtagttttttttcttttttttctcctagattgcacaataattttcctcgctggattgcactatcaggaataattgcaacattattagttgtaatacaaatattttttcaagaaaattatcatatttttcagataagacattaccctaattggaattgtcaattaatcgtcccttggatctcaagatttggtattgaattcaacattgcacttgatggtttatctattataatgcttattttttcttcttttttatctataatagctattatatgttcatggaatgaaattaaaaaaaatgaaggatttttttattttaattttatgcttgttttcactggtattattggtgtttttatttcttgtgatctttttttatttttttgtttttgggaaattatgttaatacctatgtattttttaattgcattatggagtgataaaactgaaaaaaagaaaaattttctagctgctaataagttttttttatatagtcaaacttctggtttaatattgctatcttctattttgttattagtttttagtcactattatagcactaatatattaacttttaattataatttattaattaataaaccgattaatatatatgtagaatatatagttatgataggttttttcttatcattcgcaataaagatgcctattgttccgtttcatggatggttacctgatatacattctcgatctctttcttgcggttcagtagaaataattggtgtgttattaaaaacagctccttatgctcttttacgatataatttagttttatttcccgattctacgaaaagtttttctttaattgcagttttttggggtattattagtatattttatggagcttggattgctttttctcaaacgaatattaaacgattaattgcttattcttctgtttctcatatgggtttaattttaatagggatttatagtaataacgaaagggctcttcaaggagtagttattcaaatgttatcaaatagtttaactgttgctgctttgtgtattttatctggtcaaatttataaacgttttaaaactcaagatatgagtaaaatggggggtttatggtcttgtatttattggattccaggtttttctttatttttttctttggcaaatttaggagttcctggaactggaaattttattggtgagtttttaattttatcaggagtatttgaagtttttcccttagtatctatattagcgacgataggtattgtattttcttctatttattctctgaatgttattcaaaaaattttttatggcccatgcaaacaaaatattaaagtttttttcataaataaacaagaagtatggacaataatagcgttagtctttacattagtctttttaggtttaaatccacagaaaattatagatgtttcatataattctatacacaatattcaaaaagaatttaataattccattctaaagataaggtcttaattagtaatgataataaatttacaacaattaacagcattgctgcctttgttgattataatgttaactgttatcacagtcatattatctatttcttataatcgaaatcatttttttgttgctgtattcagtatattaggtcttatattcgccctatgttcactatattttttaattgaaattattcctataaacgtaagtatattatttcattttaatagtaatgctattttatatatcggaatgattttaatttctagcatctgtacgtgtattttttcatatccgtggttattaaaatatccgtttaacaaagaggagttttatttattagtaattatttcaactttaggtgcaatatcattaactatatctcatcatatggcgtcattttttattaatattgaactaatatctttacctatgtttggtttaattgcttattcaagatatcaaaaatactctttagagtcttcattaaaatatattattttatctggcgtttcttctagttttttattatttggtattgcatgggtttattcgatttctggaggtcttgattttttatctatacataagagttttaattttgcatctgaaaaagaaatattagtagtgctgtttggaataagcatgatacttttatccttattttttaagctgtcaattgtaccatttcatttatggactcctgatatttatcaaggctctccaacatcagtattatctttttttagcactgccgggaaaatttctgtttttagcgtactattaaattttttatcatatttttctaattcagacaacaaagtaatatattttatattatcgttgataattattttatctatattagttggtaatttgatggctctttttcaaaaagacatcaaaagatttttaggatatacatctatatctcaaataggatatttgttgatagtattgcttgtatcacataagaattattcattttctttagaagctagtgcgatatatttatgtggttatttatttagtaatatagcgtgtcttggtattgtaaatttaatttcaacttcacatataaataataatgctagttcaataaattcatatcgagggttgttttggtctcatccacttttatctagtgtattgactttagttttgatttcatctgcaggtattccaatgactttagggtttattggaaaattttatatattatcaattgttatgatagaacatttatggttaataggttttgcttttctaattggaagtctattaggtttatactgttatttaagaataattttaaatttatatttacacccatcgaaattatttaaaagagatttaaatatacctctgaattgggtttatactccttctggtatagtaatatgtatttcaggaataatactgttagctttaggtatatatcctaatccattaattggcttaattaaatgtactatataatattatttttgaaaatatatttataatactaaaaaaatttttactaataaaaaaggtatttttagtggccgattttttatatgctattacttttgaagtatttttttcgatctaatcatatttatgatagactattgtatatacaaaaaaataaaaaataatttttaaaatttttttttattataatttttatatttgtgctatttttttgatatttttctgtctagttattaaaaataaaatgtatgaaattactaattaaaaaaattatattatttttttactaggtatgtgttagaaagcttatttttaatagataatattttaatgcagtgtgttattttttaatctctaaaatactgataaattttcaaaaaatactactatattagtatgcgaagttttcacattattctgaataatagttttttattgtcagatattttttaagtgttattaattattatgctcgtgtaattttttttattaataggcttagaaatttattttttctaataaaactagttcataaaaaacagtattagaatatttctaatatctgattttttagaataagtaaagatgcaaataataaaaaatttttatcatccctcttttatttgtatctttgattgcaatagatctgactaagatgatttttacagtagatagtatttcggacatttttttgtattagatctaagatttatatatcttctttatatatatagaaaaaattacatgataaaacatagattatccgaggggttatgaatttttatcatgttccaaataattttgaaaattttttttttattattctaatattgataactgttttgataatattaattattgtattagttatatttataattaataatatattatacaataaaaaatattaataattttttatttaaacacataattttacatatagatatttatattttaattttttaaaaaaatataaaaaaataaaaaattttttaccataacgtattatacaatttaattttttataagattataaaatatataagacatatttaggtctttacatgttgttctatttctcatcagaagattttcaattattttttacaaaaaaataagagtgctatgattaataaaaattactctttatctctctggcttaaatatttagagcagttagataaaaaaagaatatataatcttactgaattaaaatttcttgcaaaaaagctcggtttattaaagtcggaatcttttatttttactgttgcaggaactaatggaaaaggtactacttgtgcagtattagaaagattgttattagattcgggttatcaagtaggactatatacttcccctcatcttataaattttgtagaaagagttagaattaatgggtttgttcttcatgaagaagaacatattgattcttttcagaatgtagaactagttcgaaatggtgttttattaacttattttgaatttattacactcgctgcattaattttgtttaaaaggtattcattagattgtattatactaaaagtaggtttagggggaagattagatgctactaatattatagattctgatatatcgataataactaatataggtatagatcatacttctattttaggaagagatcgcataagcatcgcacgtgaaaaatgtggagtttttagaaaaaataaaatttctgttattggagaaactgatataccttgttctatgtatcaaatagctaaagaaaaaaaaacaatactaaagaaaattgatatagattggtcatgggaaaaaaaaagaaattattggaatttttttcattctaccatacaattgtataatttacctgagactcaggtaccattatcgagtgcagctactgctttatctactctatattattctcgttttaaaataaaagaaaaaattataagaaaatctatttctaatgttcaattgcctggtagatttcaagttatttctacctttccttatattattgtcgacgtagctcataatcctaacgctgctttttatttatctcaaaaaatagatgaaataaatataaccggaaaaatatatgcagtggtaggcatattaaaagataaagatattttgggtattattgatcctctggcaaataaaattcatcattggttcactgcccccttgaaaacgattcgaactgccaccaaacatgaattaaaaaaattttttcctattcacaatacatctattttaaaaagtattgaaatagcttataaaaaagctttgatattagtaaaaaaagaagatgctattataattttcggttcttttttaactgtttcagaatttctttctttaaaaatataaatataacacacaaaaaaatatgattttggaaaaatctatgttgttactagattatattattatttttttcattattatttcatttttttttggtttatcacgtggtttatatcaagaaatagtttcttcttatttttggttttttaatttttatttttttaataaatatgattactttagttcgttttttattaatgcagttcagaatgtttttttaaaaaataaaattttaatattagtgatgattattttttttttattataaaacatgttttaaacttttttatgagaaaacttataagaaaaatgaaaatatcttattacaatattattttaggaggtctatttggaatatttcgtagtatactattagtgttttttcttctttttatttttagttattttgatcagaatcgctataattattatataaatcattcttttctaatattattttttttaaaatataaacattattttttattattagatataatttagagactaagcacattatgatgtgtatcaatataaaaaattatagtgtgcttagaattttagcaatttaaatcagatgtttaatgttcaaacatagcagaaatagattcttcattactaattcgtcttattgcctctgctaacatacctgataaggttaatgttcgtacattaggtagtaactcaatattttctgataatgggatagtatcacatacaactacttcatcaataactgaattctttaagttttttggtgcatctccagaaaaaacaggatgtgttgcatatgcaaaaactcttttagcacctcgttctttaagagcctcagcagctttacaaagagttccgcctgtatctatcatatcatctactaaaatgcaatcacgattagctacatctccaataatattcataatttgagatacattagcacgaggtcttcttttatcgataatcgccatatcagtatcgtaaagaagtttagcaattgctctagctcttacaactccaccaatatcaggagaaacaacaatagggttctttagctctctttgaagcatatcttctaaaagaattaaactgccaaatacgttatctacaggtacatcaaaaaaaccttgtatttgttctgcatgcaaatctactgttaatacacgatctactccaatgctggatagaaagtcagctactacttttgcggttataggaacgcgagccgatcttactctgcgatcttgacgagcatatccaaaatatggtatgactgcagtaattcttcccgcagaagctcttcttaaggaatctaccatcacaactaattccataatattatcattcgttggtgaacaggtagattgaatgataaaaacatcacttcctcttacattttcatttatttgaacacttatttcgccatcactaaatcgaccgacagatgcttttcctaagttgatatataatcgatttgcaataaattttgctagtttaggaatagaatttccagaaaaaagtttcatgtcaggcataaagaaccttttttattttgaattagtagttttatgtattcgataataatattttctattcaaaaatattttattaaataaattaccattaaaatattttcttattctaacaatcaatattatcgtttataaagagttttatgcaatggtgaaatattaacactttttgctataaacccttggacgtttttaggtaacacggaaaaaattttttgtgcagattttttattatcaaattcagaaaaaacacaagatcctgtgccagtcatgcgtgaaggcgcatatgaagataacattctaattaatttttttattgggacaaattgtttttttgctatattttcgaagtcatttttaaaaggtgtttttaataatacttggagtgattttttagctgtattactcattaaaaatggacttgaaaacatataacgtgttgaaatattaatacaaggatagacaactaaataccatttttctttttgcacaataggatataatatatctcctattccttcaataacagctgtattgcccataacaaaaccaggtacgtcagcccctattctgagtcctaataaagatagttctttcaatgtatattgtgtattccataatttgtttagaacaactaaagtggttgcagcgtttgaagaacctcctcctaatccactacccataggtatgtttttttttaaaaatatttttgctccataactagaattttgtaatttaccttgtaagagtgcagttttttttaatagtttagcagcaataataatactattttgtacattcataaaaatttttttttcagtgaataattcaatattacctgttttattagcaattattttgaattgatcaccataatcaagaaattgaaacaatgtttgtatattatgatatccatcttttcgtctacctgtgacatatagaaaaagattaatttttgcgggagataaacatgtataaatcatttttttttggtttcgtttgttcatttaaaatatttttatattaatttttattaaaattacaatagaaacatttaaaatgttataatcactatcgtatagatatttacattttatcgttttaaaaaagattaaataaaaagtatttttgtatttttgattacattaataatacattgtttaatattaattaaaaattaatttttttaaaacactcagcaatagaaggtttttatgaataattctattttaaataaattaaaatctttacgaaatcgctaccaagaaattgaaataatgcttacacagaaaaatgttatttcgaatcgtgaaaatttaaagactttatctaaagaatatttgaaactttcagaaattataaaatattttattgaatgggaaaaactagaagttgatattgaaaatgtcaatatcttgttaaatgacgtagaaatacaaggtatggctgaagaagaattatatttttttaataaaaaaaagaaagcgttagaaaaaaaaattaaccaattattattacctgaagatcctaatgataaacatagttgtttcattgaaattcgatctgcaaccggaggggatgaatcgtctatttttgcaggtgaattatttagaatgtatctgcgatatgctgaaagttattcatggaaagtagaaataatgaatactagtgaaagtgaaaaaggaggatttaaagaaataattgcaaaaattacaggaagaggtgcatgtggtcgcttaaaattcgaatcaggtggccaccgtgtgcaaagagtaccagaaacagaatcacagggaagaattcacacatcaacttgtacagttgccgttatgcctgtgactcctaaaactgaaaaagaagaaattaattcttctgatttaaaaattgatacttttcgatcttctggcgctggagggcaacatgtcaataccactgattctgccattagaatcactcatatccctacaggcaatgtagtagaatgtcaagatgaacgttcacaacataaaaacaaagcgaaagccttatctattttatccgcacgtgtttatgcggcaaaattagaaaaagatcgtcaagaaagctcttctatgagaaagattttattaggtactggagaacgatctgatagaaatagaacatataactttcctcaaaatagaattacagaccatagaattaatctttctatctataaattagacgaggtattacaaggaaaattagatttgcttattgatccaattattcaggaatatcaagctgatatgctatcttctttatctaaatcagaatcatgaacattaaaaaatggattaaaaaatctattcaaaaattatctcacgtcgataatcctaaatttgaatcagaacttttattaagttatgttacaaaacacacacgtagttttattattagttctgatgaaattcaattaactgaaaaacaatataaatacttaaatcatttaattcatcgtagatctttaggagaacctatagcttatataataaaagaaaaagagttttggtctttgtctttatgtgtttcatatgatactcttattccaagacctgatacagagattttagtcgagcgagcattatctaaaattaaaagtaattctgcatgtattcttgatttaggtactggatgtggagcaattgctttagctttagctagtatcaattctaattggaatattatcggcattgataaatcagaaaacgcccttgcaatagctcgaatcaatgcttcaaaattaaattttaaaaatgttactttcttttttagtgactggttcttaaatataaaaaaaaaatttaatattattgtaagtaacccgccatatgttagtaaaaaagaaattaaattttttaaaaaagatattttttttgagccattaagtgctcttatatcagataataatggactatcagatattgagaatataataaaaaattcgaaacattacttgttttatggtggttggttaatgatagagcacggatggcgacaaaaagtaaaagttcagtatttatttaaaaaatataattttcatgaaatagaatcttatcaagattatggaggaaacgatcgtgtaacaattgggaaaaaatatgataaataaaaatttatatattttaaaaaatttgtaaaaacaaaaaatgttgtattaacaaaaacaaaaaaaaatgttatattttaatataaagtaaattttttataaaaaaattataccatttaaatttttattatttattttaaaaatattactattactaataatatgaactctctttctaatattgatttttctaaattatcactgtttgaatcaattatcgttgcttctcaggctattcgagaagattttccttcacatagtgtcctgactgaattaaaaaatagaattaaagaagctgaatcttacatttcatctgaaaacgaacctgatcgcaaattagaaaaattgctgcaattgttttatactcagtggaattttggtggcgccagcggtgtttataagctttcagatacattatggattgataatgttctaaaaacacgaaaaggcactgcagtatctctaggaattatttttttacatattgctcaatcattaaaactgccattaaatcccgttgtttttcctactcaacttattttaagagcagattggatcaacgaaaaaaaatggcttattaatccttttaatggagagatattagatcaacatacattagaagtttggttaaaaggtaatattagtccgacagcagaattatatgaaaatgatttatataaatctgaatctattactgtaattcgaaaaatgttagatacattaaaagccgcattaatggaagaaaaaaaaatggaattagcactcaatgttactaatttattaattaaaattgatccaaatgatccctatgaaattcgtgatagaggactgatatatgcacaattagaatgtaatcatgttgctttaacagatttgatttattttgtagaacattgtccagaagatcctattagtgaaatcattaaaattcaaattcactctattgaacaaaaaaaaactattttacattaaaaactatttactgtgtaatcggtagattacgtttgtgtaatgtatttaaatatagtgcttcaataattttttgacttctaatatctatttttttttgttctagataagaatcaattgcatcatatgtaacacctaaaacagattcatcatcttgctgtggatgctcatcttctaagtccgccattggtttttttaaatataaatgctttggacaatttaagttttttaataacaatcgaatttgtcgtttatttaacttggcaataggattaatatctgttccgctatctccatattttgtaaaaaatccagtaatattttctgctgcatgtcctgtgccaactacaagaccttgtttcatcgctgcaatactatattgtactttcattctttctctagccttttcatttcctcttacataatctgaaataatgacacctgatttttttaaagatttttcactgcttaaaaccgcttttttgatattaacattaaaaatttggtctggttgtataaaacgaattgcatcctgacagtctttttcatcatattgaataccatatggtaagcgcaatgcaataaattggtaggtaatatcgttcttttcttttcttaatgtttcagcagtcatttgacataattttgcagtcaatgttgaatcttgtcctccgctgacaccaactattaaagattttatatgcacatgattaactaaatatttttttaaaaaatcaacgcaattttttatttctatctctggtataattgctggttttactcccagtaattcgataatttttttttgaagtgtcatagatcaacctgatttttcagaaattgaaaatatttatatacaaaatagaaaatatattttttaatattattaaaataaataaaatggacaaaaaattgaataatttaattttagtgttaaattgtggtagttcttctataaaatttgcgatattaaatcctgataataaagaaaaatatttatctggatcagtagaatgtttatttttattagaaacatatatcacatggcagtgtttaggaacaaaacataaaaaaaaaataggtgcaaatgttaatcataaagacgctttaaattttattatagaacaggttttttcacaacaaaaagatatttttaaaaatctaataggagtaggtcatagagtagtacatggaggaactaaaataaaaaaatcaactttaattgacagtaatattattaaatgtattcaagatgcatcatcttttgctccactacataatcctgctaatttaattggcataaaaatgattatagaaaaatatcctagtttatcaagaaaaaatatagcagtttttgatacatccttttattgtaatatgcctgaaacttcttttctatatgcaataccatataatttttataaaaaatatggtattagacgttacggtgctcatggtattagtcataattatgttgctcatagagcatctcttatgttaaataaacaatttaaatctttaaatatcataacatgtcatttaggcaatggatcttctatttctgctatttgcaatggaatatgtgtagatacttcaatgggattaactcctctagaaggattagttatgggtactcgtagcggagatctagatccttcaattattttttttatgaataaccatctcaatttaagtattgataaaattgaaacaattttaaataaaaagtcaggattattaggtttaagtggaattagtagtgattttcgttattttgaaaaaaaatattattgtaaaaaacatgctaaaagatctgtagatatcttttgtcatcgtctatctaaatatattgccgcctatacaagtgtactagaaaatcgtttagatgctgttatttttactggtggtatcggtgaaaatgtacctttaattagagaattagttttttctagattatctctattaggttttaagattaattcaaatcttaacttatctactataggaggtaaatccggtttaattactgaggataattctactccagtttttgtaattacaacagatgaagaattagcaatagctcaagaaactaatagtataattaatagaaaatagttatttcttagtattttatattgatatatcataacaggaaaattatgtcccgtattataatgttaatccctttagataaagatattggtttgacttcaatcggtttgagtatcatttattttttttatcaaaaaaaaataaaaaagaaatctgttcagtctatattgtatttttcctgcacacaaaattcatctaatagtacatcgcatgttattaataaatatttttcaaaaatcgttcatacagtagattacatagatttttctaaagttttgtttaattctccagagtattcatttttattaaataaagttatagatgaacattataataacaaatttttacgtgaacttattctaattgaaggtataaaaaataattattgtattaattctgaagaaatgaattatgatatttctcaaaatttgaatgcggaagtaatatttatagcaaatttagaaaattcttctcccgaatatattaaaaataaagaaaaaaaaattaatttttttttaaaacaaaaaaaatataaaaatattttaggtgttatttttaatcaaattaattctccttttctagaaaacaaatatgattttataaaaaagttgatagttttaaaaaaaataaaaaatgaaacaaaaacaatagtgcctaaaaaaatattaaaaaataattttttctcaattatagcctgtattccttggaatcgaaacatcgtaacaacacgtgtaatagatctttttaattttttaaatatacaacatactaatttagtacaaaaaaaaaatcatatcatagaagaaataatcatattcgatacgcatcatctaaatttattaaataaacactctttaaatactttagtaatagtttcttttagtcgtgtagatgtttttttaaatgttttaaattgtaatgtgaatcgtagtaaagtgaagtgtattatattaacgggaatattaaaattaaaaaaaaatattgcttctttatataaatttttaattaaaagatctatttctattttttttacagaaaaaaatacaatagagattttatctcaattgcaaaactttaactttgatatttctgtaaaagatataacatatattaaaaaattacagagatatatttccaattttttttgtcattcttcttttatgttttttaaaaaaaaatataatataaatgtaatatatcctccgaaagaattttgttataatttaaaattattatcacaaaaaaaaaataaacgtattaaattgcctgaatcatatgaaattcgaatattaaaatccgttgcaatatgcagtgattctaatattgctcaatgtgtgttattgggtgatccaaaaaaaatttatagtattgcaaacgataacgggattaatttaaaaaaaaatattgaaataattgatcctatttcagtaagacaagaatatcttgcacgttttttagaaatacggaaaggaaaaaatatcaacgaattttctgctaaaaaacaattagaagataatactgttttagcaactttgatactggaatctaatcatgtagatggattagtttctggatccataaataccacatctgatactatacgtccagcattgcaaattattaaaactaatcctcaaagtttattagtctcatctatttttttcatgttgttaccaaatcaagttttaatttatggtgattgtgcaattaatatcaatcctactgcagaagaattagcagtaattgccattcaatctgcagattcagcaaaaatgtttggaatagaaccacgtattgcaatgttgtcttattcaacgggttgttctggatttgggtgtcaagttgaaaaagtcaaagaagctacttctattattaagaatagaagatccgatttaataattgacgggcctatacaatatgatgcagcagtttcaaataaggttgctaaattaaaagcaccttcttcaccaatttcaggatctgcgaatgtttttatttttccagatttaaattctggtaatatagcttataaagcagttcaacgttcttcaagaatagtttctattggtccaatgcttcagggtttgagaaaaccagtaaatgatttgtcaagaggtgcctcagtggaagacattatttataccattgcattaacatcaattcaatctgaataaaaacgaattttttataaaaaaatatatatttttaaattttaattgtgatatttccttttggtttacaacaacatggaaaaatttctcgttctttaaataaagcagccataggctgttttattaaataaaatacttctcctttgattaattcaattcggcatataccacaatatccagatctacattgatattctagatgaatattgtttaattctaaaaccaataacaaggttatctgtgtttgataaacaattttttttttaatatttgttatttcaataatagaggattgcatgtttatagttcaaattttttaaattcattatcagatacttctgaatcaatttgaccaactaaataagaactaatttctgtttcttgtggcgcaatttgtatattgtcagaagtcaaccaatcattaatccaaggaataggattagattgttttttaaaaggcattttaaaacctatcgcatgcatacgaatatttgtaatatattctatatactgacaaagaatatctttatttaatccaagcatcgaaccacttttaaataaatatgaagcccattttttttcttgttgtgctgcggaaataaatatattaatagcttcttctttacattctaaaactacatcttccatattttcattattttttatattacttaaaagatttaaaatatgttgagttcctgttagatgtaacgcttcatcgcgtgctatcaatcttataatttttgcatttccttccataagttctctttctgcaaacgcaaatgaacatgcgaaactaacataaaatctaatggcttctaaaacatttacactaattaaacatagatataatctttttttaagaaatcttaaattgatatgaatttttttcccatttattaagtgaataccttcacctaataaatgccaataactagttaaatttatcaattcgtcataataaatagaaatattttgagctcgatcataaatgtttttatttgaaataatatcatcaaagactaaagatggacagttaacaatgtttctaatgatatgagtataagaacgtgaatggatcgtttctgaaaaagaccatgtttcaatccatgtttctaattcaggaatagagatgattggtaaaaaggctatattcgggcttcttccttgtatcgaatcgagtagcgtttgatactttaaattactaataaaaatatgtttttcattgtcaggtaaattttggaaatctattctatctctagaaagatctatttcttcaggtctccaaaaaaacgataattgtttttcaattaattgttcaaaaattttatatttttgttgatcatatctagcgatgtttacaggttgtccaaaaaacataggttctttaagttgattattttttttttttgagaaaattgtgtaagacatgttattacacctaatgataaatttaatattgtactatatattcctaaaaatttttatttttttatttttataaaatacatgatccgctttcacaaatatcttctgttatagatttagatgtaatattttgatcgtcttcagaaccatcccgagtattttgataatagagtgtttttaaaccaagcttataagacaagagaagatcatagagaagctgtttcatcgggatcttgttatttaaaaatcttgctggatcatagtgtgtatttactgagatagattgatcaataaatttttgcataataccggctagttgtagatatcctgtattatttggaatatcccaaagtaattcgtactgtaatcgtaattttttatattcagggacaacttgacgtaagattccatctttagatactttaatactaataaaccctcttggcggttcaattccatttgttgcattagatatttgagaagatgtttctgaaggcattaaggcagataaagttgagtttcttagtccatatttttttattttactacgtaataaattccagtctaaatgtagtggttcattgcatatgtcatcaatatattttttatatgtatctataggtaattttcctaaatagtaattagtatgattaaacaaagaacatgctcctttttctttcgctaattcacaagatgcttctaataaataatattgcattgcttcaaaggttttatgtgttaaattatgtgcacttccatctgaataacgtactttatttttagccaaataatatgcaaaattaattacaccaattcctaaggatcgtctagaaatagctgattttttagctgctaatactgggtaattttgataatctaatatttcatcaagcgcacgcacagataatattgacaattctttaaagtcatcaagacttttaatttttcccaaattaaaagctgataatgtacatagtgctatttccccatctgtatcatgcacatcatttaatgacttagttggtaacgtaatttctaagcataaattagattgtcttattggagacaattcggggttaaacgcactgtgtaaattacaatgatctacattttgtacataaatacgtccagtagaagttctctcttgcatcatcagagaaaataaatctaatgctttaatagttttttttctaatatttttatttttttcatattgtaaatatatttttttaaattttttctgatcagaaaaaaatgctttatataaatcaggaacatctgagggactaaataatgttatttgatctcctgatagcattctttgatacattaatttattaatttgaatagcgtaatcaatatgacgtactctattttcttcgattcctctattgttttttaaaactaataaactttcaacttctaaatgccaaatcggataaaaaatagttgcagccccacctcttacacccccttgtgaacaagattttacagcactttgaaaatgtttataaaaaggtatacaccctgtatgaaatgcttctccatttctaataggactacctaatgcacgaatttgtccagcattaacaccaattccggcacgttgagaaacatattttacaatagagctagttgtggcattaatagaatttaaactatcaccacattcaattaaaacacaagagctaaattgacgagttggagttctgacaccagacataattggtgttggtaatgaaattttaaaagtagaaatcgcattataaaaacgatgaatatagttcattcgaacattttttggatattgtgaaaataaacatgcagatattaaaatatataaaaattgcgcactttcgtatatttttccattaacgcgattttgtattaaatattttccttctaattgttttacagctgcatatgaaaaattcatatctcgccaatgatcaataaaactattcatttgtaaaaattctttataagagtagttttttaataaattctcatcatatttttccaaatcaaccattttctttacatgatcatatagtttaggtggttcaaattgaccataagctttttttctaagatgaaaaatagctagtcttgcagccatatactgataatctggtgtatcttgtgaaatcagatcagccgcggcttttataatagtttcatgtatgttaatagtagtaatattattataaaattgaatacgtgagcataattcaacttgtgacacagatacgtcatctaatccttctgacgcccaatttaatactttatgaattttatctaaatttattttttcttttcttccatcacgtttagtgacaaacagattttttttcatcattaatttaacttattataaagagtataaaaaatttattttcatttaattattaatacatattatctacatctatagatcaattttttctatcataggatctacaattttttgtagagcaacaactttttcattttttgatgttctaatcaatattacaccttgcgtgttacgttttaatactccaacttcggaaactctaattctaactaatgttcctgcatcagtaatcatcataatttgatctttttctataacttgtattgctccaattatctttccattttttttggtaattttaatcgaaataacaccttgagtagcacgtgattttataggaaaatcagaaattttcgtacgttttccatatccattttttgttgctatcaaaatacttcctttatttttaggtacaattaaagaaacaactttgtcatttttcttaattttaattcctttaactccagatgcagttctacccatagtacgaacactattttctaaaaactgtactactttaccgttctgtgtgaataacatgatattgttatttccatcagttaaagcgactccaataagctcatcatttgcatgtaaattgatggctataattcctgcaaatctcggttttttaaattgacttaaagaacttttttttactattccatgagctgtagtcataaaaatattaaggttatcttgatatttatgtactggtaatatagctgtaatcctctctttagggcttaatggtaacaaatttactattggtcttcctcttgcatgtctactagactcaggtaattgatatactttcatccaatatagaataccgcgactagaaaaacataatatagtatcatgcgtatttgctattactaaactttctataaaatcttcttcttttatttttgcagctgatttcccttttccaccgcgtctttgagcattataatcagaaagaggttgatattttacatatcctgaatgagatagtgttactacgacatcttcttgattaattaaatcttccatattaatatcagaatgattttcggtgattttagttcgtcttttatcactaaagttattttgtattgataataattccgattttataacttcaaacattttcttaggattttcaagtatttcttttaattctttagttttttttattaaatcattgtgctccataattattttttcttgttctaaattagttattttatgtaaacgtaaatctaatatagcttgtgcctgtttttcactgaaatagtattcatgttttttagctaaataatttattttttcagatttccagtttttttgaattataattttttttgcatctattgagtttactgaattttttattatttcaataattgcattaatattaattaatgccatattcaatccttcaaggatatgaatacggttgcgaaccttatttaattcaaaaagactacgtcttataatgatttcttgtctatgtgacaagaaattttttaatatctcttttaaagataaagttttgggttgtccttgacataaagcaaccatattaataccaaaagatatttgcaattgagttaaagaatatagctgattgagaattacttcggctattgcctctcgttttatttctataacaattctcattccatctttatcagattcgtcgcgtaatgcagtgattccatcaattcttttttctttaactaattctgctattttttctattaagcgagatttattgacttgatacggtatttcattaaagacaatagattcttttttattttttttatttttttcaatctggttttgtgctcgaatataaatttttccttttccagtgcgataagcttcttcaattcctgattttccattaattatagcagctgttgggaaatctggacctggaatatgtttaattaattcttctagggtgatgtcgttattatcaatatatgctaagcaaccattaatcacttcatttaagttatgaggtggaatatttgtagccattcctacagctatacctgatgaaccatttattaaaagattaggtatttttgctggtagtatttctggaatgtattcagttccatcatagtttggtaaaaattcgacagtattcttctctaagtcgtttaatagctcatgagctattttggacatgcgaacttctgtatatcgcattgctgcagcagaatctccatcaacagaaccaaaatttccctgtccatctataagcatatagcgcaatgaaaatttttgagccatccgaactattgcatcatatacagcagaatctccatgtgggtgatattttcctataacatcacctactatgcgagcagattttttatatgctttattccaatcattatttaatatatacattgcaaaaagtattcttcgatggactggttttaaaccatctcgaacatctggtaaggcgcggccgactatcacggacatagaatagtctaagtaggagctttttaactcttcttcaatattgacctgtatgatttctcgtgaagggtctttcataaaaagtttatctcttttattgaaaaaatcaaattaagtaaaaaattataacataattaaactattagatgcatctaaagaaaaattttctaaaatgaaaagtaattcttatattaataaaaaatctttttttttttttttgtattgtttattttagatgaaagtattattataaataacaattattacttaataataaaattattgaaaagtcataattgaaaatatactagtttattaatttgattttgagaggagatattattatgacagatgaagaaaaaaatttaatagaaaatttatttcatcgtttaaaaaaaactgaattaaattctcctgaaagagatgatgcagccgatgaactaattcaaagattagcaaaaaaacaacctacttcctcttactatatggcccaaacaatattgattcaagaaacagctataaaaaaaatgagtatagaacttgaagagttaagaaaaaaaataaaaatattaaatagagaagaaacaaataaaaaaccaagttttttatcaaatttttttaaaaaaaaatctccttctgaaataatctctaacgataataacatattgaaaaaaaaggaaaatattttaccctctaactattccagttctccaatttcaccaacgactcaaacatcaccagtaataaataatacaaggagtagtagttttcttggcaatgcattacaaacagctacaggtgtagcaggtggtatgattttaggtaatatgttgatgaatgtttttagtcacactaaaccagaagaagatatattcgataccgttaaacaatcatcttcagatgagtatacagaaaataattttttaaataataacactgataatgatttaataaattactcatacaatgaatcagatataaattttagagaatcaagtgaagaaagtattaataataatgttgatgatacagacgatattgacaatgacaactttatttaaaaaaatatatatattttaagtttgaattcataatattccatattatatcagtcataagattaaaatagatataaaaaataaagccagcataaaatatttttttttgctgactttagctctcattaagaatatttacttaaatattgagaaactccttctgaagaagctgttataccttcttctccttttttccaattagcagggcatacttctccaaatttattatgaaaatctaaagcatctaccatacgtatcatatctgttatattacgtccgaatggtagatcatttacaacttgatggcgtataatccaattcgaatcaattagaaatgaggctctcagtgctataccaagatttggatgttgaattccataagatttttgaatatcatgttttacatcagataccataggaaaatttatttttccaatcccgccatttttaggtaatgtattttgccaagcttgatgaacataaacactatcaattgatacacctactatttttacatttctttttttaaattctgagtgaagtttattgaactctataatttcagagggacatacaaaagtaaaatccattggccaaaaaaatagtacggtcgattgaccattagaatactttttaagatcaaattgctcaacaatttgattgttttttaaaattgctggagcaataaagttaggtgcgttttgtgttactaaaaccattttttttcctatagtgttatactagtaaaagaaaattattgttaatttttaatcaacaatggaaatttaaaataaatatgattttatcctggaaagatgttttatctcaagaaaaaaaaaaaaaatattttattaatataattagattccttaaaaaagaacgtttaaaaaaaataatttatcctgatcaaaaagatatatttaacgccttttttttaactagttttaacgatataaaagttgttattcttggacaggatccatatttctctaaaaatcaggcacacggtttatcgttttctgtacctaaacatgtcactataccaccttctctaaagaatatatacaaggagttaaatactgatttcaaaaaagaacatatatttcatcacggatgtcttgaaagttgggctaatcaaggtgtttttttattaaatagtattttaacagtcgaatcaggaaaaccaaaatcgcatagtaatataggctggaatatttttactgataaagttatttctgtaattaatttgtataaaaattctgttgttttcttgttttggggtagtaatgcgcaaaaaaaatctcatttaattaatagaaaaaatcactatatattaaaagcagctcatccttctccattatcagcataccgaggtttttttgggtgtaaacatttttctttaactaataaaatattactcaaaacaaaaaaaaaaccaattaattggtttttgatttaaaaatagaaaaaatttttctatttttaaatgtgaaaaattatttttgaaaaaaaattttaaaaatagaaaataatattaattttcagcgactataacacttgcttttcttaaaactattttattaaaagtaaagccttttttattaacagaaataacatgattaggtagtgtttctttagataattctcttgaaactaattcgtgaatgtcaggattaaaaactttatttttttgaccttcaattttaacacctaatttattcaatatatttagtaaagattctaatgtaagctcgatgccctttattataggttgatctttgatatctactgtagtagataaatttaaaatatcttctaaagaatctattactggaatgattgattttaaaaacctttcaatttctgttttttttattttttctattttttcttcagtatttttttttatattctctatatttgctaattttcgtaattcaatatcgtttatttttttttgattttgaagaagttttagttttaaattttctattttttgattttgcacagtaatggcatcaatcaagttttcttttttttcttctatcttattgtttttgaaaatttttttttcatctaatttattttctttattatccataaaatttaccatttatgatgttgatgattaagatattataaagcctataattaatctttcaagactgtttgctattataatataatagatgttattttattaggaattcttatgtaatgaagcaacatttcacttgtatcggtattgttgggcgtccccgtcatgacagtgcactgataacacataaaactctttatgaatggttgataaaaaatggttacaaggtttttattgaacatactgttgctagagaattaaaattgaataatcccaatactgctacattaattgaaattggggaattttgtgatttagcagtagttataggaggagatggtaatttattatgtgctgcacgtgttttatcattttataatattaaaattattggaattaatcgaggtaatctaggttttcttgctgatttaaatcctgatactggtttaaaaaaattatcagaagtattatctggtaattattcactagaaaatcgatttttattggatgcacaggtctgtcaaaaaaagataatttcaagatctagcatagcaattaatgaagtagttttacatacaaagaatttagctcatatgatagaatttgaagtttatattgataataaattttctttttctcaacgcgcagatggattaattgtttcaacacccaccggttctaccggttattcactttcggctggaggaccaattatagcagcatctttagatgctattgtattggtgccaatgtttccgcatactttatctgcacgccccttagtaattcatagcgacagtataatttgtttaaaattttcaaatattcaaaccaatcttaaaataagctgtgatagtcagattattttaacaatcaaaaaaggtgaatgtgtatttattcgtcgaagttgttattatttaaatctcatccatcctaaaagttataattattttaaaactctcacatctaagctaagttggtctaaaaaatttttttaaaattattaaaaataagataactaaaattaattaaaatattttttatataacatatttttttagaaagaacatcataggatatgaataaaaaatattaattattttttatttaaactgcgatagggtattataatgaataattatattaaagcgttattgataattatttgtttttctagttgttcaatatcagataaaaacaaatataatctcgatgttttagaggcaacacatttaaataaaaatatcttaaatagaaattacgttggtatgacaagacagcaaatagtttacatttttggaataccaattatttctgattcttttgatgatatatatcattattacttatctgattcaaaaaataataatgtttatccaaaaaaaatgttaaatctttattttaaagataacaaagtttttaagtttaacatgacataatttatgacaaactttattcgaaatattataaaattttttttggagctggcgggattcgaacccgcgtccaaaatttctactaataaagccctacatgcttagttttttctttattgaattcattacctaatttggaaaaacacatattaggtatatagcttgaaaaaactacttcgtgttatcgtcaagcttgatatccacgtttttctctttttctgaccttcctgttttctcatcctaagagaaggaggataagaaggaagggctttattcagttttttaagctgctaaagcgtagttttgtttattatttgcaattatttttttacggcttttatcgaggcaaaccgttcctcggcatgcactttactttgttgataattttgtcaaatccaaaaacagcccctctttttttaaaaatgtagtattacaaaaaaaaataattttgtctattaattatttcagagtcttttgataaaatttttacatgaatattttaaatatattttttataacacttgaacagggaaattaatatgagtatttttcaaaaaataaaaaagcagattcaagataatattattttgatttatatgaaaggaactcctgaagctcctagttgtggtttttctgcacaagcagtgcaagctttatcgttttgcggagaaaaatttgcttacgtaaatattttagaaaatcctgatattagaagtgaattgccaaaatacgcaaattggccaacatttccgcaattatggatagatggtgaattaattggtgggtgtagtattattcttgaaatgctagaaaatggtgaattaaaaaaactaatattaaaggtaaaaaaaaaatatcaaacttaatctttaaggaagataggcgcaaataatatatacatgaaaatagatatgacatgaagcgaagagcattaaaaaaattgatctttgttctttatgtcatatcttttttattaaaaaaactttaaaatataaaacttacttaggttttaatatttatttgaggtactattatttttttttatatcaacaggccaaccacctaaacgtttccaacgatttactaattcacaaaaaagattagcagtttgcaaggtatcataaagtgcagagtgagcttgatggttgtcaaatgataaaccaatagctttgcatgctttggataagacagtttgaccgactactaatccacttaatgcggctgtatcaaatgtagcaaatggatgaaaaggattattttttatttttactctctgaatcgctgccattaaaaaattgtgatcaaaatttgcattgtgtgccacaacaattcctctactgcatccttgtattttaattccgtttcgcactttttttaatatagattgaatggctattttttcactaatagcaccacgcaatgggttaaatggatcaattttattaaaagctatggcatcggagtttattattgaccctttgaatggttctatatgaaagtgtaatgtgtcttctttatgtaaccatcctaattcatccatttttaatgttattatagcaatttctaatactgcatcggtatttgcattaaatcctgctgtttcaatatctataacaacaggataaaaagtacgaaatcgattgcttaataaattaaattcttggtttgtagacatcaagatctcattcttaaaatactttatgtttaatttagttaattttttctatattattacagttttaattgtagatacttttaaaatatgtattatgattcttgtgaatgctttaataattgtactataatttataaaaatatttaagattaaattattcatttaatgcttttaaaaatcatgtcataattttattatcatcgtctttaggaaaataaaatgagttatgttcttccttctttaccttattcatacaatgcgttagaaccattttttgatgaagaaactatgaaaattcatcatactaaacatcatcaaaattatatcaataatactaattctattttagaaaatacaactttttcttcattgcctatagaagaattaatatctattttaaatgaaattattttagaaaagaaaaatgcattacgtaataatgcaggaggtcatataaatcatagttttttttggaaaagtttaaaatcaggaacagttttaacaaatgatctaaaaatagaaatagaaaaacaatttggtactattgatgaatttaaagaaaaatttgaatcagtagcactaaatcattttggatcaggctgggtctggttagtaaatcaaaatggtgtattatctatagtttctactgtcaatcaagatagtccgttgatgggaaaattgatatctaatacttatggatatccaattattgggttagatatttgggaacatgcttattatttaaaatatcaaaatagacgtttagattacattaaatctttttggaatgttgttaattgggaagaagcatctaatcgtctgcaaaaatagtttatttaaaaaaaatacactattattattttgtatatgttcaatactattttattaatttgtcagtagtgttgctcgtataatttttaaaaaacatataatatatattatatgtttttttatatctcttataaaatatcaaaatgattattgtgagtttaaaggatatttcttgaatactataaaaatgatagtcgggttgtctaatccaaaaaaagaatatcatagtacacgtcataatgtagggtcttggtacctttattctttagcagaaagttatttaagaaattttaaaaatgaaaaaaaattttttggttttaccacctctctaaatatagagtcaaattatattcgattacttattccgaatatatttatgaatataaatggtcagtcggtatttaaaatggcatccttttataatatcaatttaagtgaaatattaattgttcatgatgatttagaacttcaacctggtatttcaaaattaaaatatagttatggacataatggacataatggattaagagatatcgttaacacattcaataagaatattaatttttatcgatttagaattggtattggtcgcccaataaatcgtgatcaaatagcttcttttgtcttatcaaaccccacaaaaaaagagaagatattaattcaaaaatcaattttacatgcaatagaaaaaaatgttctttcaaatattttaaaattttaattagataaaaatattttctatttttcaaggcgcatgagatatgggttttaaatgtggtataataggattgcctaatgttgggaaatctactctgtttaatcttttaactaaaggaaattcggctgttgctaatttcccattttgtaccattaaaccaaatataggcatcgttccagttattgatgaacgtattaataatcttaatcaaattgtttctcctcaaaaaacagttaatgcattcatagaatttatagatattgcagggttagttaagggagcatctcaaggtgaaggattgggtaatcaatttttaggtaatataagagatgtgcatgctatagcacatgttgttcgttgtttcaaagatgataatattactcatatttataatcaagtgcaacctattaaagatatagatattattaatagcgaattgatattatctgattttgatctttgtgaaaaaactatattaaaattacaaaaaaaaacattgttaaaaaacaaagaaacacaagaaaaaattaatactttaaaaaaatgccttaaccatttgaaacagtttttcatgttaaaaactcttaatttaaataaaactgaaaaacaattaattagttatttgcgttttttgactttaaagccaacaatgtatattgccaatattaatgaagaaaaagaatcttattattttttagataaattaaatgaaattgctaaaaaagaaggatctatagttattcctattcatgcaaatctagaattggatctagttaaaatgagcgatgaagaaaaaaaatcttttatgaaattatttaatataaaaactttgggtttaaatagtattatttcttctggttatcatttattaaatttaataactttttttactgtaggtgataaggaaattcgagcttgggcaattcctaatggtagtactagtattgaagctgctcataaaatacatagtgattttagtaaaggttttattagagcacagattattaaatatgtagattttataacatataaaagtgaagccaagattaaagaaatgggaaaatttagaacagaaggaaaacaatattatattcaagatggtgatattattcattttttattcaatgtttaaaaaaattaactgttaaaatttttgtatatgttgtttttttagagaggaaaaaaatgatcctctctaatgcaatatttatttttctaataaaaacgtttttaatttactaaaaacagggttaatattatgagataataatggtaaatcaattctattttgtagttcagaaggcagtgaaattttattttttaatattttttctacagtatttttaaatttagccggatgagcggtgcctaaaaataagccaaattcattttcttttaattgatctcgcaacaatctatatgctattgctgcatgaggttcagaaacataacctaatttaaatagttcttttaatgtttcttctgtagtatgatccgatacacttccaaacctaagtttttttaaatcccatttttttcgataaaataattcttcaattcgagtccaattattaggttgactgatatccatagcattagaaattgtagatacagtttttttaggattccacgtaccattattaaggaatcttggtacggtatcattcgcattcgtacatgctataaatgatttgattggcaaaccaagagatttagataataatccagctgttaaatttccaaaattaccgcatggaactgctattactaaattttttctttgttcttctgaaattaaagagaaagcttcaaaataataacagatttgtgctaataatctacttatattaattgaattagctgaatttaatcctattgattctttcagttttttatcgttaaaagcttcttttactaatttttgacaatcgtcaaaactaccattaattgatatagtttttatatttctacctaaagtacaaaataatttctcttgtaattcactgatcttgcctttaggatataaaataattactcgcacatttttcattccatagaatgcatttgctaccgctgcacctgtatcacctgatgttgcagttaaaatagtaactgattcattttttttatttagtaataatatcatttgagccataaaacgagctccaaaatctttaaacgccaatgttggaccgtgaaacagttcgaagcaatgtatatcttttgtaatttttatttttaatggatgtttaaatgaaaatgcttgtttaacatgtttatatagttcttctttagatatttcatgacaaatgaatttagaaagtatttcagtactacgagtaataaaatccatttttaatatttttgataattcaataggagtaatagtaggtaattctacagggaaaaacaacccttgttgctgacctaatcctaattttacggctgcttcaaaatttacttgttcgttatggttttttaaattgtaaagtttcatttttttttatcctattttacgtacaccctttgaatctaaaaaacaaatatgaacaaatcctgttgtattttgtaaataattttctgttaaccatgcggatattttttgagctgtatttatgttatcagaaatagaaaaaatagtaggtccagagccagatattccagagcttatagcaccaatttttttaattttttcttttacatacaaataattaggtaataatttaatacgatatggctctgcgataaaatcttgcatcaatcgtgctgctagatgaggttgttgactgtatgaagcatgaataaaacctgctaaataacgactatttttaatacatgtttcttttttatatttttttggtagtatgtctcttgcttctgcagtaggaactttagttccaggccaggctactatccaaaaccaatttttaaaatttggaatagtttgacttattatttttgaatcttctaatattagctgaagtcctcctagataacatggggcaacattatcatagtgtatactgcctgatatttcgccttctacttcccccataagaagtagtaattcttttgaatttaagggtttatcgcaaaattcattcattgcaactaaagtagctactattgaacaggcactagaacctaatcctgatccaataggcatatttttttctagtataatagaaactggaatatttctttttatggtattacaaaattttaaccagcacttccaaacaatattttgttcggtatttttaggtaatttattagaaaatatacctttattaactaaattaaatttgtttgataattttactgttacaaaatcgcccaataaagaaccattgacaggtataattgctgcacctaaaatatcaaatcctactccaacgttaccaatagaagctggtgcataaattttaatcattattactatgctcctgacgtttatgatagtgtacgcagtaagtcggaaaatactccagacgccgtaacattgttaccagcaccgtagcctcttagtaccagaggaattggttgataataattagtataaaatgctagtgcattttcaccattttttactttgtataatggattattaatattaacttcttcaagttttataaaaaattgtcttttttgttctattgttgctacaaatcgtaatacattacctacattaagcgcctgtttgattttatttgaaaaatatacgtctagttcttttaattttaataaaaatttatcagtgtcctcatatattttaaaattatttggcaataaaggttcaattttaatatcttttaattctatattatatccagattcacgtgctaaaattagtaattttcgtgctacatctatacctgataaatcatcacacgggtttggttcagtaaaacccaattccttagcttctctagtagcttgtgataacaaaataccttcttctaatcttccaaatataaaagatagtgatccagataatatacctttaaaacaaattaaattatcacccgatttaaataaattttgaagagtttctattacaggtaatccagcaccgacattagtttcatatagaaattttttacctgtttgagccacagactttcttatttttttatagtaattccattcgctggtatttgcttttttatttgaagtaacgacatgaaaattattatcaataaaatttacatattgttcggataataattgactagatgtacaatctacaatgactgagtttgaaaaatgattattttttattagattatttaacaattctaaattaaatttttgagttgattttttaaaatcatttttccagttagataaatcatttgtattgtctaacaataatatttttttagaatttgcaatagcacaaattttaatttctatattttttttatctaaaaattgtttttgttttaatatttggttcagtaatgtactgccaattccacctattcctattaaaaacatatgaatagtttttttattaaaaaacaatgtattatgaacatgttgaacagcttttaaaatgttttcttttttaatcactaatgaaatagaatgtttcgaagaaccttgtgagattgcaatgacgttgatttttaaagcgcctagaacagaaaatatttttgacgcaatattgtgttttttatagatattcgatcctactattgagaggatagataaatttttctttattttgaagggattcaacaaaccatcttttaattctagttgaaattctttattgaataaatataaaattttataaatatcatgttcgtaaacacagaaattaattttattttctgaagatgattgagtaattaataatattttaatatttcctctagacatcattgtaaatatacgtgaaattacacttcctacatcttttatatgaggtccagatatattaaacattgctatttcatcaagatgagtaaccccttttaggaaatctttttcggaacagttttgttcgcaaattaatgttccaatagatttaacattatttgtatttttaattaaacatggaattttaaattgagcaattggttcaatagtacgagggtgtagcaccttagcaccgaaataagacagttccattgcttcttgatatgatattgattttaataaacgagcatttggaacttttcttggatcagaagtaaaaactccgtcaacatcagtccagatttcacaacaattcgcatctaaacaagccgctaacaccgcagctgaataatcagaaccatttcgtcctaataccactaattttttatctttatttcccgcaataaaaccagccattaaaataatattactttgattaatattcatgttctgaatattttttttagattcagatatatcaacagttgaatcaagataattatcacctatagcaactaaatttttaacaggattaataatagttacattataatttttagattgtaatatacttttcattatgaaaactgaaagtatttctccacgagaaattataattgcacgaatattatctggacactgttttaataataaaatcccttgtatgatattttttaactcattaaattctttttttataattttttctatttctttatgaggaaaattagattgtatatttaaaaaattgtttattagttgcataaatatattttctgcaagatgtactgtttctaaaatttgattattcttaatagtgttttctataatttttactagatagttagtaattttagctggtgcagaaagtactaccgcaatttgatctgtttgagtgttttcttcaataatactagatacagataaaaatttttctgcattagctaatgatgtaccaccaaattttaataatttcatattttataattccttatatttatatcacaaaaaaacccgccttaagtatgagcaggtttttaaagattatttaagcctacatcataactagttataataattagaacagctattctagtgaagaggctgtaaatagatgtcaatattttttataaatacgtaaagtgtattacctaattatattaggtagtatcttttaatataatttaattattaattaaaaatatttttatttatttagaatgctgtaaaagcggtatttttgattttatcaaaaatcagatgtgttgatgtctacaaaaaaatattacaatgacaaaattaatttgtttatacttaaaaaagtattatagtatttttttaaatttcatattttataattaggtataaaagaaattatatttttatataaaaaatatatattttcattttttaaaatattaaaaagaactgttttttaaaaacttttttagatgcattaatttttataacataatgatcattattagtgcaatagttaaaaaaataaatattttattttttattgtatattagaaatttatttattcaataaattgtgtatttctaatataatattattatatttttttaagttttttcatatcatttaattcacactaactatttaattaatattatgaaacatactcttcaagtgatcatcactgagaaagaacttgatattcgtgttcgagaattgggtcaagaaattaccaagaaatatagaaatagcagaaataaaatgatactaatagcattactacgtggttcctttatatttatatcagatttatgtcgtagaattcatattgaacatgaaatagattttatgacaacttctagttatgggcgtgggatgttatcgagtggagatgtaaaaattattaaagatttagatgaagatatctataataaaaatgttttaatcgtagaagatattattgattcaggaaaaactctaagtaaagttttagatattttgaaacttagaaatccaaaatcattatcaatttgcactcttttagataaaccagagtgtcgcgaggttaatattaacgttgattttataggtttttctatcttagaaaacttttttatagtaggttatggtattgattatgctcaatcttatcgttaacttccaaacataggaaaagtagtttttaaaaaataagtaaattttaataatttaaaattatttttttgttatcaattaaacgagtatttcccaaccatacagatgctagaagaataacttttttgacttttttagatggatgttctaaatttttataatcgtatatgtcgaatatgtcaacagaaaatcctttttttattaataatattttagattcatgaataattttaggtctaatattatcatcttcttttataattttttcacatgttttttttatgattttatataaataaggtgctatttcattttcttgggaacttaaataattatttcttgaacttaaagctaatccattttttagtcgtattgtaggtaagctaattatttttatcatataattcaactcctttacaaggatttttataattaataattgttgataatctttttctccaaaaaatgcaaaatctggttgtataaagttaaataacttagtaataattgtcgtaacgcctctaaagtgtccaggtcgtgattgaccttctaaaattttagataatttgataacctcaacaaatgtttgatgttctatgccattcgggtatatttcatttatatgaggaaaaaaaaggatatctacgtggtatttttttaatattatagaatctttcataaaagttttagggtaatttttcaggtctgataaattatcaaattgcattggattaataaaaatacttactataatgatatccgaatatttttttgctaatagtattaattttatatgaccatcatgtaaattacccattgtaggaactagtcctatttttttatttgattttttaagaatttttatttctttatatagtacttttattgtttttataatatgcatatttactccattttttaaaaactatgttttttgctaggataaatactatgttccacttcatatatatacttttgaattgctttttgaatgctatcgctctctgagagaaaattttttgtaaaactaggtgtttttccttcagtaatacctaataagtcatgcatcacaagaatttgtccatcagtatttttacctgatcctattccaataactggaattgataaactttcagtaatcttttttgctagtttttctggaatacattctaatataagcatattaattccagattcttctaataataatgcttcatctattaatttattagcgtcattttcttttcgtccttgaactttatagccacctaaataatgaaaagattgaggtattaaaccaatatgaccgcaaattaatattaatctattagatagttctctaataatttcaattagccattttccaccttccatttttatcatatttgcaccagatcttataatttttgctgtgtttttaagagcctgtttagtgtcataataagacataaaaggtaaatcagatattaagaacgtattaggagctccttttctgacagcttttgtatgatatgcaatatcttcaatcttcactggtaaagtagaagtgtgaccttgtatagtcattccaagagagtctcctataagtatgacaggaatgccacaattagaaaacaatctagaaaaactaaaatcataagctgtaatagctgcaaatttttttttatttattttccaattctttaattgagagattgtaatggactccatgttagctccgtttaatgatattattattataatgtatgtgaaattaataaaggatatccgaattagtttttcaaattagtcgaatatccttgtttaaatgttttaatctataaaactaaccagtcatttgtttttctctaatttctgctaacgttttacaatcaatacatagatcggcagtaggtctagcttctaaacgacgaattccaatttcaacactacaggagttacagtagccaaaatctttttctttgattttttttaaagttatctcaatttttttaattaattttcgactacgatcacgatttcgcaaatctaaactaaattcttcttcttgtgtagcacgatcaataggatctggaaaatttgtcgcgttatcttgtatatagagtagagtatggttaatttcatcttgtaattgagttttccatgtctcaagaattttataaaaatgcagtatttgatctttattcatgtattcttcatctatttttttttgataaggttgcaaaccagcaatagaaagaacatttaaagatgatgtttttttgtttttttctttttccatagctctctccgaagataatatttttactaaatatcaaatataaagaaaaattttaaataaaatattttttttaaagtatattaaaaatataattttcttattttatttgtaaagaaattattataataaactatgttaacataaaatataattaaatatttttttatataattctatttatttatcaagtcataaacagttctttttgagaataaattcattattttatcaatattcataatagggttctttttaaatggtggcaaaaaatgttaaaacatttgctttaggagttgaatatgatggtagttattaccatggatggcaacgtcaaaaaattttacctagtattcaagaagaaatcgaaaaagctttatctataattgctaatcataagattgatgtagtgtgtgcaggtagaactgatgctggtgttcatagtataggacaagtgatacactttaaaactacagctaatagaaaaaaatcttcttggtcgataggtgtaaatagttatctttctgaaaatatttctgttgtatgggtaaaagaagttacagaaaattttcatgctcgttatagtgctattacacgttcttatcgttatataatatataattatagtcttcgttctgctatttttcaaacaaaattaaatcatatttatagaaaactaaatgtagacaaaatgaattttgaagctcaatttttattaggagagcatgattttacatcttttagagcactcggttgtcaatcacattctccttggagaaatattacaaaattaaatgtatttcgttttcataactgggtagtcgtggatattactgctaattcttttttacatcatatggtgcgtaatattgttggttccttaattgaagtgggaatatctaaaaaaaaagaatattggataaaagatttattggaaaaaaaagataggagtcacgcaggagccactgcaccagctaaaggtttgtatttagtatatgtagaatatcccttacattttaatttaccgagatcagcatatacttctattttctttaaataaaaaaattaaaattattttttatttattaatttttagaaaaatattttcgataaaatttcaggggtttattgatgttttttaattttaaaaaatattttcttataaaagtatttttttttgtattaattttaacgctttgttatgggttatatttatacgttaagataaatcgattcataaatggaaaagtatggaattttcccacttcaatatatggacgtatagttaatttagaaccaggaaattcatattctcaaaaagaagtattacacttgttgaaaagcacaatgtatagaaaagtagatttagttatgttgccaggagaatacagtataaaaaataatactatagaatttatacgacgtgcttttgattttcctgatatacgagaagatgaatttcatgcgcgattgtattttaataaagatactttagtaaaaattaaaaacattgacaacaatcatgattttagtttttttcgtttagagcccaaactaattgctatgttaaaatctcctgaagcaaaaaaacgaatgtttattcctcgcaatcaatacccggaaatgttagttaaaacattactagctattgaagataagtatttttatgagcatgatggaattcacttatcatctataggtcgagcttttttagtaaatctaatggctggccgcacaattcaaggtggtagtactctcactcaacaacttataaaaaatttatttttaaccaatactcgttcaatattacgaaaaataaatgaaatctatatggctttaattttagatagattttatacaaaagatcgaattttagaattgtatttaaatgaagtttatttaggacaagatggtgatgaacaaattagaggttttcctcttgctagtatttattattttggtagaccaataaatgaattgaatttagaacaatatgctttattagttggtatggtcaaaggtgcctctttatatagtccttggactaatcctaatcttgcattaaaaagaagaaatttggttttatttttattgtataaacaaaaatatattacaagaaaaatttataaagatttatgtaaacgatctttaaatgttcagcctaaagggaatattatttcatctcatccttcttttatacaacttgtatgtgaagaatttcacaaaaaaatttataatcctattaaaaattttccgggaacaaagatatttactactcttgattatacttcacaaaatgcagtagaacaagcagtaaaaatcgaaatacctatattaaaaagaaaaaaaagactaaaggatttagaagttgctatgatcgttatagatagatttacaggagaagttcaagctcttattggcagttctaaaccagaatttaatggttacaatcgtgctttaaaaactcggcgttctattggttcattatctaaacctataacatacttaactgctttatcacaaccagagaaatatcatttaaatacttggatttctaattatcctctttcgattaaattagatagtggtcaatattggacaccaaaaaataataatttttcttttagtaaaaaagtgctcttgttagacgcattaattcattcaattaatattcccacagttaatctcagtataaatataggtttgaaaaaattagttgatagctggttgcttttaggcatttctaaaaaatacattactcctctgccatcaatatctttaggtgctatcaatttaacaccttttgaaatagcacaagtttttcaaataattggaagtggtggttataagtcgtctttatcatcagtaagatcaattatatctgatgatggtaaagtgctttatcagaatttgcctcaatcaatacatatagaatcttctgaagcttcttatttaacactatacggtatgcaacaagtagttaagagtggaactgcaaaatcattaggaaccatttttaaagaattttctttagctggaaaaactggtactacaaataatttagttgataattggtttgtcggaattgacgggaaacaaattgtcattacttggataggaagagataataaccacacaacaagattatatagttcttctggtgcaatgcaaatttacaagagataccttcaatatcagcgtccagtaccactagtattaaaagctccaaacaatattaatatgttttatattaacaatctaggagaattattttgtaaaaaaaataatcagcacaatcgaatgctaccaatatggtcgataaaaaataaaaaaatttgtaatgataaattatcagaacgtttttccataaaaaagaaaaaaaattttttgttttggttgaaaaacttgttttaaaataaaaaataaaatttttattcaagagagatggtataaatctatattaaaacttaaattctatttaactatctattatcaatatttattttagagtattttattaaattgaatttttagttatgttttgcattaattaaaatagaatcattaatcagttcatttgaataataataaaaaatttttaacttttacttaatttgaaaaattttaatgtgagaatttatacatgttaattcaatttttaactaaaatatttagtaaccataataatcgaattttaaaaaagttcaaaaaaatagttttatctgtcaataaattagaaaaaaactttgaaaagttatcagataaagaattacaagcacaaacagaactgtttcgtttacgattaagaaatggtgaaactttagatgatatattaccagaagcgtttgctttagtcagagaagcgagtaaacgtgtttttagcatgcgtcattttgatgttcaaattcttggcggaattgctttgaacaaacaatgtattgcagaaatgcgtacaggtgaaggaaaaactctaacatccacattgccggcttatttaaatgcattaaatggaaagggtgtacacatagtaaccatgaatgattatttagctcgtagagatgctgaaaaaaatactcctttatttgaatttttgggtttaacagtaggtttaaacttatccgaaatgtcttttttttctaaacgtaaagcttatttatctgatatcacttatggtacaaataacgaatatggttttgattatttacgtgataatatggttttttctcctgaagaaagagtacaaagaaaattaaattatgctttagttgatgaagtagactcgattttaatagatgaagctagaacacctttaattatttcaggaccctcagaagatagttctgaattatataaagaaattaataaaattgttccttttttaaattctcaaaaaaaagaagattcagatattttttgtggaacaggagatttttctattgatgaaaaatcaaaacaaatctatttaacagaaagaggattgattaaagttgagaaaatattatttgataaaaaattaatgaatacaggtgaatcattatattcttcaaataatataatattaatgcatcatgtattatctgcactgcgtgcgcataaattatttgttcgaaatgttgattatcttgtaaaagataatagtgtgattattgttgatgaacatacaggtcgcactatgccaggaagaagatggtcagatggattacatcaagcaatagaagcaaaagagaatgtttctataaaaaatgaaaatcaaactttagcatctattacttttcaaaattattttcgtttatatgaaaaaatagcaggtatgacgggtactgctgaaactgaatcgtttgagtttaactctatttataatcttgatactattgtaataccaacaaatagaaaaatgatacgtaaagattttccagacttagtatatatgactgaaaaagaaaaaatcaatgctattattcaagatatacaaaaatgtataaaattaaatcaacctgttctagttggaactgtatctattgagaagtcagaaattatttctaaagaattgttaaaattaaatattaatcacaatgttttaaatgctaagtttcatgctaaggaagctgaaattatagcacaagcaggtaaacctggatcaattaccattgctactaatatggcgggtagaggtacagatatagttcttggtggtaatttagaagttgaattaaataaatataaaaatataacttcaaggaaaattgaagaaattaaaaaaaaatggcaatcagaacatgatttagttgtttctgctggaggactacatataattggcaccgaacgccacgaatcacgccgtattgataatcaattaagagggcgttctggtcgtcaaggagatactggttcttctcgtttttatctttctatggaagactcattaatgcgaatttttgcgtctgataaaattgttcatatgatgaaaaaattaggattagcttttaatgaagcaatcgagcattcctgggtaacaaaagcaatagaaaacgctcaaaaaaaagtagaaaatcgaaattttgatattagaaaacagctactagaatacgatgatgttattaatgaacaacgtagtgcaatttattctcaacgtaacaaattaattgatgcaagagatataaaattaatgatttatgatattttcaaagatgttttaaaaaaaaacattattttatatatacctaaaaatacatttcacgacaaatggaatattactgatttaaaagataaattaaatatagatttttatttaaatgcgcctattttagattggataaatatagaaccaaatttaacagataaaaaaattataaaaagaataattgattttgctagaattaattataaaaataaagaaatattaattggttcaaacaatatgcgtatcatagaaaaaattattatgttgcaaacattagattcactttggaaagagcatttagcagctgtagactatctcagacaaggtattcatttacgcggttatgctcaaaaagatccgaaacaagaatataaacgagaatcttttaatatgttttctagcatgttagaattattgaaatttgaagtagtttcatttcttagtagaattaattcatcttatgcaaaaaaatatatagatttaaataaacatttagtaataactcataataatactatgaaaattagcagaaattcaccttgtttatgtggttcagggaaaaaatacaagtattgtcatggtagtttgtaactattaattttttttataaaacaagaaaatcttttttataaaggatagactctgtgaattatgtagaagctgcaattggaattattatcaaaaaaaaaggtttatattactagagggaaatataaaaaaaatatatgggaatttccaggaggaaaagttaaaaaacatgaaaacatagtacatgcattaaagagagaattattagaagaagttggaattattgtcttaaaaattaatttttttcaatatatagaatatatttatcctgaaaaaaaaataaaattatacttttttttaaaaaaaaaatggaaagggcgaccttatagtattgagggctatacttatctttggaaacgtttatgtcatttaagagctttggattttccacttgcaaatcatagtgtcataaatgctcttaaaaaaaataatattttaataaaatttcgttaaaaaattctttttgatgtttattgttttatttttattatatattcttgataaatgtgaataaagcaaattaaaataataaatatatagattaatttttttaaaattttttttattaaaaataatatcatctgataaagaaattcgggtttttctactagattgtaacgcaataatttttttagcttctaaaaagctaattttgtctcttctgactgtgcgttttatttgttcttttacaggagtatcaattaaaagaattcgatgagcttttttttctaattttttttcaactagcagtggtaccacccataaacaccaattagattgtgtcatttttatttgatgtttggattcttgatagattttaggatgcaatagattttctaaccataaacgatgatgatgattattaaaaacatactgtctaagtagcaatcgattaatagaattatctatatttaatattttctttccaaattttcttttaatagaaaatgatacttgtagatttttttctattatgttttttgcaataatatctgtatcaataacgttaatacctatttttttaaaaccattagagatagtagtttttccactactaatgcctccagtaagtgctacaatataagtcatactattttaaattttcatggttagtattttatgtttaaattaggacgatcattttatgagaattgaagaagatattaaattaggttttaaagatgtattaattagaccgaaacgttctatattaaaaagtcgttctcaagttaatcttgcgcgttgtttttcttttaaatattccgctagtatatggtctggcatacctattattgcagcaaatatggatacaataggtacatttgaaatggtcaaatctttatcgaaatttaatatattaaccgcagttcataaatattactcttttgaagagtggaaaaattttgtctgtttatcttctaaagagatattaaatcatgtaattgtgtcaattggaacttctaatatagactttttaaaaattaaaaaaatttttttattatcttctgaattaaaatatatttgtattgatgttgccaatggttattctgaacacattgtttctttcttaaaattagtaagagattattttcctgataaaattatttgcgcaggaaatgtcgttacaggtgaaatggttgaagaattaatactttctggagctgatatagttaaagtcggaattggtccaggttctgtatgtactacacgagttaaaactggagtgggttatcctcagctttcagcaattatagaatgtgcggatgcagcacatggtttgaatggacaaattattagtgatggaggttgtactgtttctggagatatagctaaagcttttggaggcggtgcagattttgtcatgttaggaggaatgctatcaggtcataaagaatgctcaggagatataattgaagaaaagtcaaaaaaatatatgattttttatggaatgagctccgtttctgcaatgcagcgttatgaaggaaaaattgcaggatatcgtgcatctgaaggaaaaacagtaaaaataccatttcgtggtggtgtagatagtactatacgtgatattttaggcggtttacgttcttcttgtacctatgtcggtgcagaaaaattaaaggaactaacgaaaagaactacatttatacgagtcactgagcaagaaaattgtatatttaatgcttttaaagaataaataatatttattataaacattttacattttaaaatcaataaaattaattatacttatatatatatttaattttattgattttttttagatgtttatgatttttttaaaaaaatataagagcattcacaataaaatttttttaaagttaaaaaataattgtaataattttttagatgaaatattaatctaatcgttaaatatatataatgtataaggaatttataccatgtcagaaaatttatataatgacgtggatccaattgaaactcgtgattgggtgcaagctattgaatctgttattcgccgagaaggtcataaaagagcacattttttgattgaacaagttttaaaaactgcaaaaataaatagaaaagaattttttaggtcctcttttactagtgattatattaatactatttctagagaagatgaatatgagtatcctggaaatcttattttagaaaagcgtattcgttcagctattcgttggaatgccatcatgatggtgctgcgtgcatcaaaaaaaaatttggaattaggtggtcatttatcatcttttcagtcttctgctacaatatacgaagtgtgttttaatcattttttccaagctaaaaatcataaagatggaggtgatttagtttatttccagggtcatatttcacctggaatttatgctcgctcttttttagaaggacgtttatccgaagaacagattgataattttagacaagaagttgatggaataggcttatcttcttatccgcatcctaagctaatgccaaatttttggcaatttcctactgtatctatgggtttaggaccactttgtgctatttatcaagcaaaatttttaaaatatttgcataatcgagaattaaaaaatacctcaaaacaaatagtttatgcttttttaggtgatggtgagatggatgaacctgaatctaaaggcgctatttctatagcagttcgtgaaaaattagataatttaatatttataatcaattgtaatttacaaagattagatggtccagtagttggaaatggaaaaattgtaaatgaattagaaagttttttctatggcgcagggtggaaagttataaaagttatatgggggagtagatgggattgtttattaaaaaaagatacatctggcaaactgattcagttaatgaatgaaacagttgatggagactatcagacttttaaatctaaagatggtgcgtatgttcgtaagtatttttttgggaaatataaagaaacatacgacttagttaaagacatgactgatgaagaaatatggaaacttaacagaggtggacatgatcctaaaaaaatgtttaatgctttaaaaaaagcaaaagaaacaaaatataaaccaacagtaattctagcacatactgtgaaaggatatggaatgggagtaatagcagaaggtaaaaatattgctcatcaaataaagaaaataaatatcaatggaataatacacattcgagatcgttttaatatccctgtatcaaatgatgaaataaataaattaccatatgtaacttttaaaaaaaattctgaagaatattgttacatacattcgcaacgaaaaaaattaggtggttatattccctttcgtttatccagttttactggaaaattgattttaccaaaattaatagattttcaatcattattagaagagcaaaaaaaagatatctctacaactgtagcttttatacgtgtgttaaatattattttaaaaaataattctattaaacacttaatagtaccaattattgcggatgaagctcgtacttttggaatggaaggattatttcgtaaaattgggatttatagttctagtggtcaaaagtatactcctcaggatcgagaacaattagcatactataaagaagaaaaaaaaggtcaaatattacaagaaggaataaacgaattaggtgcagcttcatcttggttagcagcagctacttcttatagcactaatgattttcctatgattcttttttatatttattattcaatatttggttttcagagaataggagatttgttttgggcggctggagatcaacaagcaagaggttttttaattggtggaacttctggaagaactactttaaatggtgagggattgcaacatgaagatggacatagtcatatacaatccttgactattcctaattgcatatcttatgatcctgcttttgcttatgaagttgctgtaattattcaagatggattaagacgtatgtatggtccttctcaagaaaacatatattattatattaccacaattaatgaaaattattatatgcctgctatgcctataggtgtagaagaaggaatttgtaaaggtatttataaattaaaaactttacatggtactacatcaaaagtacagctgataggttctggtgctattttacgatctgtttgtgaagcggcagagattttattaaaagactattctattacaacggatatatatagtgttacttcttttacagaattagctagaaatggtgaagattgtgaacgatggaacatgcttcatcctaatgaaaaaaacaaaatagcatacgttaaacaaattatgaataaaaaccccaccgttgcggctactgattatatgaaattattcgctgagcaaattcgacactacattccctctcaagaatatcatgtattaggcacagatggctttggtcgttcagatagtcgtgataaattgcgtgatcactttgaagtgaatgcttattatattgttatagctgcgttaaatttattagctaatataaacgatattaagaaaaaagttgtagaagatgcgattatgaaatttaatattgatgctaataaaattaatccgcgtttatcttgagaggtgaaaacagtggatatagaagtcaaaatgcctgatattggtttagaagaagtagaaataattgaaatattagtaagtattaatgaaaaaatagcaccagaacaaggattaataactgtggaaggagataaaacttctatggaaataccttcacctatatcaggtattgtaaagcatatctttattaaaattggcgaaaaaattaaaactgatgctctcattatgagatgtgaagtggagaatattgattttcatgtaaagaaaaaagaagaaatttgtttagataataatgttttaaataaggttgaaaaaaatttcaaaaaagatattttttttcatgcaactccattaataagacgtttagctcgaaatttaaatataaatttatacgatgttgttggtaccggacctaaaaataggattttaaaagaagatttagatctatatcaaagtaatattaaagagaatcttatagaagaaaaaaataaaattaattttggtgattctaagaaatcaaaaacaaaagaattagaattaagtgatatccagaaaaatattggtaataatttacatcggaattggatgaatatacctcatgttacacaatttgatgaagttgatattactatattagaaaagtttcgtcaaaaatataataacgaaaagagaaatcaaaaaaaaacaaatgaaaatattacaattttagtttttataataaaagtagttgcatatgcattagaaaaattccctatttttaacagttcactaaatattaataataaaaaaattattttaaaaaaatatattaatatcgggtttgcaatagatgtaaataacgatttatttgttcctgttttaaaagacgtcaataaaaaaaatattaaacaattatcttctgaattaatattgctatcagaaaaagcacgaacaagaaaattaaatattgaagatatgacaggaggctgttttacaatatctaatttaggaggtattggaggaagctggttttcaccaattatcaattcaccggaagtagcaattcttggtatttcaaaatctcagataaaaccgtcatggaatggaaaagaatttattccttctttaatgttaccattatctttatcttatgatcatcgtgtaataaatggtgcttatgcagcgcgttttattacatttattagtagagttttatcagatatgcattttttaattatgtagttttcgctatttcacattacttaaattttttttaagaggtcttaatgaataaaaaaatttatacacaagtagtagttattggatcaggtccagcaggttactctgcagcttttcgttgtgcagatctaggtttagatactgtcttaatagaacgttatgataaattaggaggtgtttgtttaaatgttggttgtattccttcaaaaacattattacatatagctaaagttattaaagaagcaaaagaattgcataaaacaggtgtttcttttaataaaccagatattgatattaaaaaaattaaaaattggaaacagcatattgtaaataaactaactgatggtttaagtagtatgagaaaaaaaagaaaaataagaatttttcaaggccatgctatttttgagaccgataaaagtctttgtgttacaaatacagaagataaatttactattttttttgataatgcaattattgcaactggttctaaaccaattaaaatcccttcaatacctcatgatgatataagaatttgggattcgactgatgccttatcattaaaaaaaatacccaacaattttttaattataggtagtgggattattggtttagaaatggcaacaatatatagtgcattaggttcgaaagttgatattattgatcgttttaatcattttcttcctgtaatagatgaagatatttctagtatatataaaaaatctattaatcaacaatttaatctgatgttaaatactcatatagataaagtagaagtgaaaaaagatgcattgatagtagacatgatacatgaaaatattcccaaaaaaaatatattgtatgatgctgtattagtagcaataggtagaactcctaatattgattcattaggattagatagaatagggttgaaaataaataattttggttttattcaagtaaataatcagttaaaaacgaacatacctcatatttacgctattggtgatgtagctggtacacctatgttggcgcataaaggagttcatgaaggtcatattgcagcagaggttatttctggtaaaaatcattatttcgaacctaaagtaattccatctattgcatatactgatcctgaaattgcttgggtaggattgagtgaaaaagaggctaaacaagaaaatataaattatgaggttgcaattttcccttggaatgcatctggtagagctattgcttcaaattgtagtataggtaagacaaaactaatttttaataaacaaaataataaaattattggcggttctatagtaggatctaatgctggtgaattaattggtgaagttggattggccattgaaatgggatgtgatgctgaggatattgctttgacgattcatgctcatcctactttatctgaatcaatcggtttatctgcagaagtttttcagggtacagtaacagatgtattaaatttcaaattaaataaataatgatttttttttattaaaaaattttttttagaaaaagaaaagattatagaaattaaacttctataatcttttcttttttttaataagatttgattgtagtttatacaaacattaaatattttattcaatttttgcaaatacatgttttaattaaatatttataaaacagagtctatctagatatatttcttccataatagatttcacgcatttcctttgagagtagtttcttaatataagaacgttcctctttttctagattttctaaattaatattaaataaataattttttaaattaaattctcttaataacattcgagtatgaaaaatattctcttgatatacattaacatcaaccatgtcatacattgattttatatcatccgacataaaattttgaatagaatttattttatgatcaatgaaatgttttattccatgaatatctctagtaaatccccgcacacgatattcaattgttacaatatctgattctaattgatgtataagataattcaaagcatttaagggtgatataattccacatgttgagacttctatatcagcacgaaacgtacaaatgccgctttgaggatgactttctggatatgtgtgtacacaaatatggcttttatctaaatgagcaagcacagaagatgatacaatgtttttatttaaagcatcgatcttctccatactcattggttcttcacatactaaaatagtcacactcgcaccttgaggttcataatcttgatgaaatatgtttaaaacatttgcaccaataattgaacaggttttttttaaaattttagttaatcgaatagcattatattgttcatcaatataagaaatataactattacgcgaatcattggtattagcatagcaaatatcatagatacaaaaacttaggcttttagttaagttattaaagccatataattttagtttttgcaatttaatcactcccctatgaaaggatttttaactttcatttaattcattaagaatatattgaggtaaataaaaactacttatatgaattttagcattatagtaattaaaatctaattttgtattttttatacgtatttgtattttttctagactatttttacgatattctatattattagtaccccacgcgaaaaccattacccccccataataagttggaacattcgcttgataaaatcttgtatcataaaaatatttttttaaatttttataagtaagaatggtttcatttttttgaagaaaaaaaacaccgttctgtgctacaaaaataccattttcttcaagatgatttttacaattaaaataaaattctgatcgaaataaattctttccgcagccaataggatcagtggaatctgatatgattaaatcaaacttttcttttgttctttttatgaaattcaaaccatcatcaataatcaagtttaaacgagaatcttgataggcctgattactatgatttggaaaatattttttacacaaatcaatgatatttacgtctatttcaaccatagtgatattttcaatcattttatatctacatacttcacgtagtatgcctccgtcacctcctcctattattaatacactttttattgaaccatgagcgattataggaacatgagttagcatttcatgatatataaattcatcgcgttcagttgtttgaacaatatcatctattaccatgattttaccaaaaacagaattcttaaaaatcattacttgatgatgaggggttttttttttatacagcattttttcaattaaaaagtattgtccaagatgacaataaagcttttcatgccatgtttttttgtgatccatggttatatttatatatcctataaaatgtaacgttatagattattttgggattaataaaaaactacgagtattgtgaaatagtagactttattttcagattttttaaaagaaggataatgattcttgaaaaaataaatgattttttaaaaaaactttattaattatatctagacgttttttataaaaaaattttaaaaaaataaaaaatttccttaataaaggttatcaaaaataatataagaatgctattttttattaatcagattctatgatatttacatatcaattaaattctctaaaattatttttacaaatttagaaagttgatatgatacaaaatcaatattttctttaaaattaacagtagcattattatctgattcatcagagatagattttatgataataagaggaatattaaatttatagcaaacttgtgctattgcagaagattccatttcaactgctattgcagaaggaaattgtttctttaagatttttatactttcattttctctgacaaatgtatcaccactcaaaataagtccttttatatattttaattgatatttatccgcattctttttaaaaaaattgcatattttctcattaactgtaaattctttcggatacccaggaatttgtcctcgagtatatccaaagtttgttaggtctacatcataataacatgtttttttaggtatgatgatatcgccaatttttaaaaatgattgtaagcttccagcagaaccactattaataatagtatcaggtttatataaatcaattaaaatcatagttgcaacactagcagaaactttccctattcctgattttattagaaaaacatcatgacttttaaattttcctatataaattttgtaagtgttaatttttttttctatataaaaatgtattattttttttaatctttcagtttcttgatttatagcacctattattccaattttcattttgatatgacttataatgaatttttaaaatcacataagattttttgacatatcttatattttttaaatgctgaatgatgagccgcatccacatgtattttttgcgtttggattgtaaacaataaatttagaaccttctaggttttctaaataatctatttgaccaccatataagtattgtaaactaatggggtcaatgattaaggatacctctgattgggtgattatgatatcgtcttcattgattgaagtatcaaaaataaattgatattgaaaaccgctgcatccaccaccatttatataaattcttaattttaaatcatgatttttttctatttcaataagattttttatttttttaattgctttttcagtaaattgaagatgacttttaaaagcgttttccatatttattttgttctcgcaatgttttatatgtttttcgaatacaaaccttctattttaattttatcataaataaatattttttaaatattttatatgtgtgttttgtatttattagtattccttgcgccgacaagttatttagtctttattggcgcaggttatcaaagataatgatattatcaatcagtacttgattcaatattttttaaaaaatatattgataattttaaaaattaatctgctcttttgcgaagaaaagaggggatgtctaaatattctggttctttgttaattttttctttggtattttttatttctttttttattatttttttatctgtcttttttggagatatatttaaatattgataacgataatccattaacacttctctagaagatttgttttttatttgattaacatctaaatttttttccatcccgataccagtagcaacaactgttacacgaagtgtatcattcatatcaggatctaaagaagtacctataaccactgttgcgtgatctgaagaaaaagatctaatagtattaccgacagtttcaaattcatctaattttaaatcaaaaccagcagtaatattaaccaaaacaccacgtgcgccagataaatctatatcttctagtaaaggactagatatagctatttctgaagcttcttctgcacgattttctccagaagatatccctgttcccatcatcgcatatcccatctctaacattacagtacgcacatcagcaaaatctacattcattaaaccaggtcttgtaattaattcagcaattccttgtacggcgccttttaatacattattagctgcgctgaaagcgtcaagtaaggaaatacctcggctgagtacttttaacagtttatcattaggaattataattagggaatctacatattttgacaattcaattataccttgttctgctacaatcattctttttttaccttcaaaattaaaaggttttgtcactacagccactgtcaaaattcctaattcttttgcaatttctgcaactacaggagcagctccagttccagttcctcctcccattccagctgctataaaaaccatatcagaaccgtctaatgcagattttaacagttctttatcttcttctgctgaagtgcgtccaatttctggattagctccagctcctaatcctttagttatattgtttcctatttgtatcgtttgtccgacttctatttttcttaatgcttgtgcatcagtattaattgcaaagaattcaacaccttcaatacgctctcgaaccatgtgttctactgcattactacctccacccccgacaccgattactttaattattgcgttattacttaattctgaaggttcaaacatgatttatttccattatatatctatatttttttataaagttttaagtataatatgtttttaaaattcttttttaaaccaattattaattcgtttaaaaattatttcaaaaaaagaatgttctttttttttcttatcaatattgatataagattcttttccataatgtaataaaccaattacagttgagtaacatggttcagtgattttttctattaatccagaaatattaaatggtttagcaacacgtacttttttttgaaaaactttttctgcacagtcagtcaagcatgaaatattagatccacctccagtaagtactatgccacttaataattcatatttttctccttttttatgaagttttttttgtagatgaacaatttgatcttgtactaaagataataattcaacatatcttgattcaattacgtctattaatgcatcctgttgtaaattttgttgaaaattacagttaatatcagaaaaatcaatattttttgatgatcctaaaggtggctttttgactgatccatatttgatttttatattttcagcattatcgcgagaagtactaaaagcatatgagatatcactagttacaatatttccagcatatggaataacttgactgtattttatagaaccatcaatataaatagtaaaatctattgtacctccacctatatcaatcatgcatacaccaagattacactcatcttcagttaaaacagctttgctagaagcaagacctgaaaaaattacttgatcaacttttacatcacatttttctacggctttaataatatttctagccatattttgatggcacgtaatcaaatgaacttttacttgcatacgtactccggataaacctatagggttttttattccatattgttgatcaattgagtattcttgaggtataacatgcaatatatgatgttcatttagaatttgaactgattgtgctatatgtattacatgttctatatcttcttttgtcacttcatcatcagaaattggtattattccaatttcattttgacaattaatatatttgttagatagagatagatatacggaagtaatttgacaatctgccataatttcagctttattaatagattcttgtatacatgaaactattaaatctaaattattaatctttcccttgtctatgcctttagataaacaagtaccaaatccaattattttaatattatcatctattaatacttctcctaccaaagtcacgactttagtagtaccaatttctaatccgactactaattttctgtcttttgatataatcattatttttagcccatactttatttctttaaatatttctttttttgataaactaattttttatatttatgctatttttaaatttaaagacagaaattttttttcttattgtgtatatataaaaaaatataacatataagataaatatcttattaaaaaatataaactattcgaagtgactatatattaaaatacactctaattattcgtattcaaaattaataaaactagttcatcaaatgatagtcctgtttcttttgcagacattggcactaaacttctatttgtcataccaggtattgtatttacttctaacaaccaaaatttattttcattatctaatatagcgtcaattcttccacatccactacatcctagtgtactccatgctagaattgctattttttgtaattctttttcttggattgcatttaatccacttggacatgagtatttagtagaagaggatgtatatttagcatcataatcataaaaattattcttggttgtaatatgaatagcaggtagtgctttttgacctaaaatcgatactgtgtattcttttcctactataaacttttcaataagaatatgattgtcataattaaatgctgtttttatagcatcattaagttgtgtgagatgggatactatagttatacctatacttgacccttgattgtttggtttaattagaacaggcagacctaatttcaatattttttttattataagatcattatctaaagatataatatttttttttttgaaaggtaaatatcaggcggagttgcaagaccacgagatttccataataatttagttctaaatttatctatagatattgcagaagccataattccactgccagtataaggaatgtttaaatattgtagaactccttgaatacttccatcttcaccacctttcccatgtaaagaaatatatgctttatcaaaaccttcttgttttaatttcataatagaataatcacgtgtgtcaataggatatgcatttaatctagattttagtaaactattaagtacggcatatcctgatttgattgaaatttttctttcagaagatacaccacctaataaaactgctatttttttgttcattttatcacttttttagtttttttaattaatattttatgtgctatagtatctatatttccagcaccttgtattaaaataatatcatttccctgtaatgtctgtattagagtatctaatatcatattatgattagaaattaaagttacataattttttcctagtttttttatatcattaaatagtgaaagactatcagctccaacaataaatttttcatttgcagagtagacatgcagtattagaagaacatctacttgagataaagtttgaacaaagtcatgatataagttatatgtcctagtgtatcggtgaggttgaaatatcattattaagttcttattgggccaactaattcgtattgttttaatggtttcagataattctgtaggatgatgcccgtaatcatctatcaacatacaattagcacgtttatcaaaaccttgatcaattgaaagaaatccaaggaattcaaatcttctacaagtaccttgaaagttttttaatgatgcaatcataagatcattattaataccttcatgtattgctagagcaatagctgctgctgcattcaatgcattatgtttaccagggatgtttaatataatatttaattttttattattttttaaaattatataaaaatgtccaataaaattgttttgtttatataaaaaaattcgcacatcagcatttttattaaatccatatgttattattttacattttaaattagttaaaatatcgcaaatagcattgttgtctatacatactatagctgttccgtataatgtaattttttttaaaaaaattaaaaaggtttgttttaattttttaaaactattatcataatgatctatatgatcaggttcaatattagttacaattattatattaggatttaaatataaaaaagaagcatcactttcatctgcttctgtaataaaataactagaagatcctaattttgcatatgaattaattgattttattaaaccaccgttaattacagttggatctagaccactatcaataaaaatatctgcaatcatcgatgtcgttgtagtttttccatgtgtaccagaaacagctattccttttttaaaggacataagtatttcgatcatttctgctcttagtaatataggaatattacgttttttagcagcaagaatttctttattgtttgaagagatagcgctagatttaataataaaatcaacatttttaatatttttttcggaatgttgcaaatatatagtcgcccctagattaattaatttctttatcattaaactttctaataaatcagagccactaactttatatcctaattttaataaaatcaaagcaattcccatcatacctgcaccgccgatgccgataagatgaatatttttattttttttttcagaaataaaaaaattaattttttttatatcttttatattcatactttcatctttttaatttttattgatttaaatgtacaatatttaagtttttttagagattttgttgataacattaaaaatattaaatattgcatctcgaacaccaagagaatgagctttttttgccataataaaaagcttatctctatctaatgaattaagtatattaactattaatttcgtattaagatttgactgatcaataatttttgcagcaccaattaattctaaatcttctgcatttctatgctgttgtttgtctttatgtggataaggtataaagatagcgcctaatcctactatagatatttcacttacagttaaggctccagaacggcaaataattaaatcagcccattcatatgcagaagctatattttttataaaagaggttattaaattttgatttaatctaagtttattatatttttttttagttttttctaattcataatttcctgtttgatgccaaaaaataattttttctttcaataaaaatgatacttctggtaaaatacgatttaaaatagaagaaccttgacttccaccaataacgagtactcgtaaaagacctgttctatttttaaaacgattaatgggattaggaacttttataatactttggcatactggatttccaaccacttccgcatttcttaaaactccaggagacgcttgcatattttttgtagatattctagacagccatttatttgtaatacctgcaattttattttgttcatgtaaaagtaacggaatattacagttccaagaagctacccctcctggaccagatacgtaccctcccattccaagaacaatgtctggagaccaagtttttattattttttttacagcataataagctcgcagtatatatattggagaaataattaaatttttgagactagtattgcgcaatcctttgatcgaaatataatgaattttaataccatatttaggtataattctagattctatgctattttttgtacctatccaattaacaagccatcctttttcaattaaataacgtgctatagtaagccccggaaaaacatgaccaccacttccacctgccataattattatttttttaggaatcatttgggacctctaggaaatgcttgcgatgtttttaatcttgtttcaaaatcaattcttaaaagaaaaaaaatagctattgaattaataattaaacttgaacctccatagctgataaatggcaaagttagtcctttagtcggtaaaataccggtaacagaaccaacattaattgatgtttgaaaactaagccaaataccaatagaacatgctaaaaatcctgaaaaaatttgttttttttctagcgctttttgtccaatatacattgctcggaaagaaatagtaaaaattattaataatattaaaaaagagccgatataacctaattcttcacctataatagaaaatataaaatcactatgtgcgtcaggtaaataatctagcttttgtattgaatttcccaaaccttgacctaaaaaatttccacgtcctaatgctattaatgattgtgttagttgatatccattaccaaacggatcttcccaaggattccaaaaagataaaactcttttaattcgataaggttctaataatattaataaaattatagttaatatactaacagtaataattataaaaaattgtcctattttagctccagaaagaaataaaactgatatagtagtaaaaaaaagaacgacaacagtacctaaatcaggctctgctaatagaagcattgactgtgttataataacactcatgggtttaaaaaaaccccagaaattattgcgtacttcattagattttcgtgataaataactagcaagataacaaaaagaagaaattttacatatttcagaaggttggatatgtaaaaaccctatattgatccatcgaaaagatccatgtattgaatgaccgataagtaatactaatactagcaatacaattgaaataattagtataatattgctatttttttcccaaaaaatgatcggtgttcgtaaaaaaataaaagataataaaaatattaaaaaaaaataaaaaatttctctttttataaaaaataatggattatgatatatcttttgacttataggaattgatgtagagatcaccataattaatccgacagaaaataaacctagagtcaaccatactaatgcacgatcatatagtataaaataagaatttcgtgtgttatatttttcttcaatcttttttggattttttgaattttttttttgtaagtgtttcaagttatttcctttattaattttataaaaagattacctctctcttcaaagttagaaaattgacctaagctgctgcacccaggagacaaaagaacggtatcacctgatttgacttgttttgaaattaaaattactgctttttttaaattttcaacataaatagattttttttcacatatttttgacaatttaatgccatctcttccaaaacagtaaatttttatttttaaagttctaaaaatattttttaatatattaaaatttgcagatttactatcgccgcctaataataatcttattgttccagttgtttttatagaatttaaagcaacttgagtactatttacatttgtggatttagaatcgtttatccaacgtactcctttttcattttttattatttgaaatcgatgtggtaaattcgagaaacttttaagtacatttattgcgtcatttctagggaattgcattgcatctgaaatagctaaagagactaatatattattgtaattatgatatccatataataatatttcactagtatttaatatttttttatttttaaaaaataaaatagggtcattgcttttagaacaaatacgataatcacttctatttgttccaaaactaatccattttttattcttactatgaataagacttttttctatcttatcattagagttaattatacaaatttctgcttgattataaacagacaatttagtgtttttatattgttggaatccatttgggtatcgattgatatgatcttcgctaatattaagaataactgctatcttagattttaaattaaatgtattttctagttgaaaactagacagttctattatgtataaatctgcttctttatcaagtatttctagtacgggaacacctatattaccacctagaaaagctttatatcctgatttttttgcaattttttcaatcatggtagctacagtactttttccattagtccctgttattgaaataataggacaggtcacttctctagaaaatagttcaatatcactaataatctcaatacctagcaaacgtgctttaattaaaataggtttaaatgaagaaatacccggacttataacaattaagtctgattctagaatccactgatggtctaaacttcctaaactatattcaatattttgaggaattttaataaaatttgaaggatgtttagattcatcaataattttaggttttattcctttttttaaaaaaaaattaatgcaagatattcctgttaaacccattcctaaaattaatatttttttaccaaaataattatatgacatcaacatacctttaaagaaatgagacttatgagtaacaatattagtgacacaatccaaaatcttacgataatcaaaggttctaatattcctttgacttcataatggtggtgaactggtgccatttgaaaaattcttttttttcttattttaaacgatataatttgtaatatcacagatattgtttcaaaaacaaaaataccacccatgataattagtagtaattcttgatgtaataatattgctatagctcctaaagaaccacctaatgctagtgatccaacatctcccatgaacacttttgctggatagctattaaaccataaaaaacctaatcctgaaccaacaattgccatacataatatagctagttctgttgaattttttacatattgaacatgtagataatgtgagatatttatattgtcgctaaataaagatattaatgtcaaaccacaagttaaaaaaataactggcataatagctaaaccatctaatccatctgttagattaactgcattactagtgccaactagtacaaaataagaaagaaatatatataaatagtttatttcaaaatcattctttatacaaaagggaattattaattcagtagaaataatatctttattgtttatcttaatcatacagatgaatatgaaagcaataatagataaaaaaaaatatttccattttagttttaatccttgactatttttatactttatttttttataatcatctataaaacctattaagccatatcctattaaaatacttatgacgtaccaaatataaatattggataaattacagtatagtattgtcgaaaacaatatagaaaaaattataaaaattccacccatggtaggtgtgtttttttttgaataatgtgtttttggcccattatttcgtataatttgatatgtttgtaattttttaaagtaatatataaaatatggcccaatatatagattgataaaaaaagaagttaataagctaaatattgcacgatatggaatataagaaagaatatttaaatttatatgtaaatatttattaaaaaaaattagcatttttttttgctctccttaataagatcttctactactttttccatttttgtactacgagatcctttaactaatatggttattttttttttctttaaaaaaacattttttaaatattcgcttaatttttttttatttaaaaaatgtttgccattattaaaaattttagtgatttcactactcatatcaccaatgctaaaaattttattaattgcagatgaattagcagtatttcctatcatttgatgatacatcatactgttttctcctaattcggccatatctccagttactaatattttataacctggcattctttctaaaacttttattgctgaaatcatagatgaaacgttagaattgtaggtatcatcaattaaaattttattgggttctagtataatagactctaatctttttgaaacaataggtgtgtccaatagtcctatttttattttttttaaaggtattttaagcgcaaatgaaaaggcactagctgctaatgcattagatatgttttggtaacctaaaaacggtaatgaaatatttatttttccacacggtgtatgcatcgtaaaagatgtgccatgtatatgaattttaatattactacaaaaaaaattactatattttttttttttaatagaaaagaacaaaatattactgttctttatgtcttttttccattgtgaaaaatgatgactatctaaattaataataactgtactattaggttttaaaccagaaaatatttctgattttgctttagatactcctaataatgatttaaatccttgtaaatgagcacaatgaatattattaattagtataatatctggttgactgatattactagtataagcaatttcgcccggtttactcgcacctaattcaatcacaccatatttatgttcttgttttaattgaagtaaagtcattggaacaccaatattattgtttaaattatcaatagtagatattgtattcccatttttcctaagtatagaggccgtcatttcttttactgaggtttttccacaagaaccggtaatagctaatatttttgccttagtttttttgcgaacccagccagcaatttgacctaacgcaatagaagtattttccactataatatatggaacatggggttttatatttttttgtgtaacaaatgcagcacactttttttttaaggcatcgtgtataaaaatatgagcatcaaattttctacctattaaagcaataaaaagacaacctggaataatttttttagtgtctatgacaatttcatttattaacaaatctgctccatatagcgttccgttcgttattaaagcaattttttttaatgataaagaaatcatatattttttcctaataaatttaatactatttttttatctgaatagtttatagatctattttgaattatttgtttttcttcgtgtccttttccagctattaaaattatatgatgatattttgctccgaaataagcataagatattgctttttttctatcagggataattaatattttttccttatttttacaaccatttaaaatatcttgaataatttttttttctttttcatttctggggttgtcattagtaatgatcactttatctgacattttttctgcaatagcacccataatagggcgttttttttgatctctttctcctccgcatccaaatatacaccatatatatctttggtaatgtgaatgaatggcattaagtgttttttttagtgcatcaggtgtatgagcgtaatcgataataaaagttggttttttgacataagaaaataattccattcgaccctgtactggtattattttttcagacgtatggattaagtctgataaactatagcctagttctaaaagacaagctaatgacaacaggagattagtgacattaaaacgtccaattaaacaagaggatattcttcctgttccccaactagattcaaatgtaatataaatggaattattattctgttcaatattagtggcattaatccattttgtagaatattttttttgttttctgttttgaatagtaacagctactgtgtagaaattaagtagtttttttaaccatattttcccatattgatcatcagcatttaatataattttttttaccttatgtgtactaaataataaccattttgcggattcatatttttccaaattttcatgataatctaagtgatcttgagttagattagtgaaaattgcaatataaaaaggaacttctttaacgcgatgttgtatcaaaccatgtgaagaaacttccatagtcactaattcagcttgtttttctaagactttagataagaatagttgaataaaaataggcgaggaagttgtattatttgtaggttgcaaagaattataaaaaccatttcctaaagttcccatagttgctgtttttgtacctaaaattgtactccactgattgattaattgtgttaccgtagtttttccattagtaccagttatgccaatgatttttaatctctttcctggttctttataaaaacgatttgctaacaatgatacattttcagatagtttaaaaaagtatattagaataacattcttgatatatttaaatattccatgcttatctttttttttagtttcacatagaatagctgctgcttttttattaatagcttgaacaatgaaatgacggccatctttttttatccccggaactgctataaacaaatctcctggagttaaagttctgctatccatcttcaaatttgaaatatatttttttggaatatttttaatccatggtaataataaatattttaagcaaattttattcattcagttccttttatttgattttaaaatcattttttgatttgacaagttatctggttttatattcattttttttaatattagtttcattatattactaaaaactggagcagaaaccgctcctccataatatttttttccttgaggattatcgagaataattatcaatgaaaatcttggatcgctagctggtgcaattcctgctgtataagctgtgtattttttaatataacgcccatgaattcctactttttttgcagtccctgtttttacagcaacacgatatcctcggactgccgcttgaagacctcctccacctggttgagaaacactttccatcatattaattacttttttgacatattttggggggaaaatttgttttccgcctgttggacggtcagtttttataattgaaagtggacgatatattccataactagcaatagtagaatataatcttgctaactgaagtggagttaccataagtccgtatccaaaagacaaagtagctttatctaaattagaccacctttttttaggagggaaaaaaccatgtttttctcctattaatcctagttgagtaggtttacctaatccaaatttaatataactatcgagtaattttaaagttggcatggatagtgcaatttttgacacacccacgttacttgatttttgcaatataccagttatcgtaagtttttcatgataggatacatcttttatttgatgtttttgaattaaaaaaggttttgtatcaataattgaattttcttgtattattccaagttttaacgcttctataatgactattggttttactgttgagccaggttcaaaaagatctgtaattgctttattacgaacatttttttgtatgatatgtcgtatattattaggattatatgaaggactatttgccatagctagaacctctcctgatttaatgttaattaaaattgcagttccagaatcagattggctttttttaaccccttcttgtaattcattatatacaatagtttgtaattttgtatcaatgctaagatttaagttattagatgctcgtttatgaactaaagatattttttcaataacatgtcctttattatcttgtcttatttttctttttcctggttttcctgttaataataaatcgaagcttttttctattccttcaatccctattccatctatattagtaaaacctactagttgagctgaaatttctttaaatggatagtatctttttgattcttctaataaaaaaatgccaggtaactgtaattttttaatatattctgaaatttcaggattaatttgacgagctaagtaaataaattttgattttttatgagaatttatacgtagaaacattttttttaaaggaatagaaagaatttctgataaagcttgccaacgtttatggtttttaatattttttgtttttagaattactgatggatctgcacaaattgcgtttactaatacagtaactgctaacggataacctcttcgatccttaattgcacctcttgtactaagtaaagattgtgttcttaatgttcgacgatctccttctgttattaatcgattagaactgataatttgtaaaaaaattacgcgaagtgttaaaataaacagggacaaaaaaataaagccatataataaaaaaaaacgccaatttatataatttatttgttttgattttaaaaatctatttttttcttttttatacattttctaaataatatccatcaatgtacatttatttttataaaataaaaatttttttatgctaaaattattttttttgaactgtagaatgaatagataaagaatttttttcaattattaaatttctccattcatcattttttttttttttttttgaataacatcttcttcttctgtaattaataatcgagtattataaactgtaatgatgactaagctagctgataatataatagctattaataaagttaaatgaattttcccatataaaagaaaatcatttttgatgattttaggtaaatcataacgttgaattttcatatttattcttgtatttctgcgatacgaagtacggagctgcgagctctaggattattatttatttcattttgtgtaggtaatatacgatttataatttttaatttacatgttgttaacctatttaattgttcttccgtaataggcattccgtatggaataattgcttttgtgctgtttttaatcatgaatttttttactaatctgtcttctaaagaatgaaaactaataatagatatacgtcctcctggcttaagtatttttagcgtgctttctaaagctttttgaatttcttctaactcttgattgatataaattctaattgcttgaaaactccttcttgctggatgtttaaatttattttttgttggtatagtttttttaataatgttggctaattctagagtactggttattttttttatttgacttctacgtttgatagcataagctatttttcttgaaaaacgttcttctccgaaattttttaaaacaaaagaaatttctttaacattactttcaaaaagccattcggaagcagaaattccataattaggattcattcgcatatctaaagggccgtcatttttaaatgaaaaacctcttctataatcgtcaatttgtattgaagaaactcctaaatcaaatataattccatttactttccctataattttttcattttttgcaaaatctaataattttgaaaaattttcattaattatatgaaaacgtgaatctttgatttcacttcctatggagaaagcaatggggtctctgtcaatagaatataatcgaccattttgtcctaattttttcaaaatttcatttgaatgtccacctgttccaaatgtactgtcaatataaataccgtttttttttatttttaaagaatcaattagttcttttttcattactggaatatgtttaaatatgtgattcattttttaaatatagacgatataaagtaagaatatagtacatggtcatttctatttaaataaccatgtttaatattttttagaaagaagaatgtgaaatgttattaatttaaatttaaaacatttatccccgagaaataccaacaattccagaacgagttacctcgataatttctgaaaaattacgtattatttttaaaaaagcatcaatttttttcgtagtaccagacaattgcaatatatatgttgcagatgttatgtctacaatttgccctcgaaatacttcagtaatatgttttatatcatctcttctatgattgtttatctgaacttttaataatacgatttcccgttctatatgagaagattgtccaatttgtacaactcttaatacatctattaatttatgcagttgtttttcaatttgttcaatagctttttcatttcctactgtttgtatagtcattttagataaagtaggatcttcagtaggtgctagcgtaatagtttctatattatatcctctttgtgaaaagagtcctattactcttgatagtgcacctgattcattttccaataaaatagataaaattcttcgcatatttttaggcaacctcttttttccttagccgcatttcattcatgccacccccttgaatctgcataggataaacatgctcagaattatctatttgaacgtctacgaacaccaaatgaccatcagacaatttacttaatgcaagcattaatttctcttctaattctataggttcagtaatttggataccaaagtggccataggattctgataattttacaaaatcaggaagtgagtccatataagaatgggaatgtcgtcctgaataaatcatatcttgccattgtttgaccattcctaaagaagaattgttgagatttaatattaatactgctaaattatattgtcgtgctgtagataattcttgaatattcatttgaatactgccatctcctgtaatacagataacagtttctttgggcagggctaatttaactcctaatgccgcgggtaatccaaatcccatggtacctaatccacctgaattaatccaacgtctaggtttgttaaatggataatataatgcagtaaacatttgatgctgtccaacatctgatgtgatataagacgttccttttgtgagtttaaaaagagttttaataactgtttgaggttttatcttattacttagttgattgtattgtagactatttatttttttccattttttaatagtattccaccaatcttctaacagtgaaattttcttttctttttttagtaattctatcattttttgcaagacatgtttagcatctcctacaataggtatattggcagatacagttttagaaatagaagtcggatcaatatcaacatgtaaaacaatcgcatttggacagtatttatttaaattatttgttgtgcgatcatcgaatcttacaccgattgcaaaaataacatcggcatgatgcatggtcatgttagcttcatacgtaccatgcattcctaacatggaaatattttgatcatgagtgcctggaaaactacctaatcccattaaagaagtcgtaacaggacagttgatcttttctgcaaaaattcttaattcttcactactgttagaactaataattccgccccctgcataaatcactggtctttgagcttttaataatgtatgcagagcttttttaatttgccctatatgacctttagttgttggattatatgaacgtatattaatattatctggccatttatagagatatttattgtctttttttaaaatatctttcggtaaatcaattactataggtcctggacggccactagatgctaaccaaaaagcttttttaaaaacaattggtatatcttcagtttttttaactaagaaactgtgttttactattggacgagaaattccgatcatatcacattcttgaaaagcatcataaccgattaatgaagaagcgacttgtcctgaaataacaaccattggaatagaatccatgtatgctgttgcaataccagtaatagcattagttgcaccgggtccagaagtaactaatactactccagtttttccagtagaacgagaataaccgtcagccatgtgagttgcagcctgttcgtgtctcactagaatatgttcgattccaccaacggtttttagagcatcataaatatctagtacagcaccaccaggataaccaaatatatgctgtattccctgatcaattaatgatcgaacgaccatttcggctcctgataatatttccatttttttcctccaggatactaatttattaggttgtatttcctagatctctatctatcagtttatcctgtagttcatctagataaaattagcactatttagtttaaaagattataaaaaattcaaaaaatttatttttaatgttatgttttatttaagaagtcattttaaatgatgtcatgttttattactattaaatgaaaaattaattttgatttttattattgcaaatatatcagatattatcaattaatagaaagtattaagtattatttaatgtaatttagtttttatatgttgaatgattggaatatttttttcaactaaaaatcttttaaatttaggtgagatccatgttgaaaaaacattttttttttgagtaataagacataccgctaatttctcttttaatgctaacttttgagcttttctaaaacctagtattaataatcctgtatcccaagcgtctgattctaaagctgttgaggaaattacactaactgaaactaaattatgatgtataggtttgccgctatgaggatcaattaagtgcgaaatatgttttccttcaagagaataataattacgataactgcctgctgtactgattgcattattctttaaatatacaagtaagtgtattgattttcttctatcaacaggtttttgaattgcgataattttatcttttcttgtatttttttctactttgactaatacagctcctcctactgagatagtataattttttattttttttttgtaagtatacgtgacaaatgatctacagcaaagccttcaccaagagtggaaagattaatttctatcccatctatatctttttctagaaacatcccaaaagaatttttaataagttttaaatgttgacttccggaaaggaaaattttttcttttattttttttttagaaggataatgagtgagtttttctttagtgccaaatccccacatattaattaatcgactaattgtaatatctaatttcccattagtttttcgattaatttttagggcggttgaaataattttaaaaaaatcttgattgattatttgacgctgatgtttttttagtctattaaattgagatacaagagaatttttcttccaagaagaaagcattttttcatcttcatctaaattttgttgtattaaattttttatgtattttttattttttaaattagggatcttgacttgccaatatgtacccatagtttttcctgttaatgttgcaatattttgtttttctctatctaaatatctattataaaaattaacgactataaatataaaaaaaataaaaacactgtaaataatttttaagaacataaataatattattctcctaattaacaaaaataaattttatctgataaataaaaaaataaagttatagatttttttgagttttcaaatataaatatttattattttgtagtttgttttctaattttcaatctttttaaaaattttatatagatattaaccagaaatggagttaaatatcgatggagtgtataataaacatttattctattgtgtaatgcattataataatatctttgtttacagattagattgtaattatgagaaagaaataatgaaaaaatcagctataatattaagtaaaataatactgattttgacgctattactaagttttggaatgtcttggaataatgttttctctaacacaaaaaatagtattgtttccagagaaatttctcctagtttagcgccaatgttagaaaaagttatgccttcagtaattagtattaatattgaaggaagtgcaattacacgtacttctcgtttacctcatcaatttcaaccattttttggtgataattcccctttttgtcaaggaaattcaccatttcgacactcacctttttgtcatattaatcctgactctgatgataaaaaagaaaaatttcgggcattaggttcaggtgttattattaatgctgacaaaggatatgcagtaacaaataatcatgttgttgaaaatgcaaataaaattcaggttcaactaagtgatggacgtcgatatgaagcacgagtaattgggaaagactctcgttctgatattgctttaatacaattaaaaaatgcaaataatttaagtgagataaaaattgctgattccgataatttaagagtaggagactatactgtagctattggaaatccatatggtcttggagaaactgtaacctcaggtattatttctgctctaggacgaagtggtttaaatattgagcattatgaaaattttattcaaactgatgcggcaattaatagaggaaattctggtggagccttagttaatttaaagggtgagctaataggtattaatactgctattttagctccagatggcggaaatattggaataggattcgctattccttgcaatatggtaaaaaatttaacagcacaaatggttcaatttggacaggtaagacgaggagaattaggtataatgggcatggaacttaattcagatttagcacaaattatgaaaataaattcacaaaaaggagcatttgttagtcgagttttacctaattcttctgcatttgaagcaggtattaaagctggtgacattataatttctttaaatagaaaaccaatttctagtttttcatcattacgtgctgaaataggatctttgccagttgcaactaaaatggaattaggagtatttcgcgagggaagaattaaaaatattactgtagaattaaaacattccgtaaaacacaatttaaattcagaaaatgattatataggaattgaaggtgtagatttaagtgattatatatttaatgaacaaaaagttataaaagtagataatgtaaaaccacatactcctgcatcaaaaattggttttaaaaaagatgatattattcttaacgtaaatcagaaattaataagtaatgtggacgaattaaagaaatttttacatagcaaacctaaaattttagtttttaatataaaaagaggaaatgatactatatatttagtaagcgaataataattttatagttccgcccgaacaaatacgggcggcttttttcttattttatatttcgtaataattgattaatttctgtttttcctaatgtttttgcatctactttttttacaataatagcagcataaaggttgtaatttctattttcggatggcaaagttccagaaactactacagaatgggcaggtactcttccgtaaaaaatttttccgttctctctgtcataaatttttgtgctttgcccaataaaaacgcccatagaaatcacacatcctttttctataacaactccttctacaatttcagaacgggcaccaataaaacaattatcttcaataattgtaggattattttgaagaggttctagaacgccacctatacctacacctccagatatatgcacatttttacctatttgagcacaagatcctatggtagcccaagtatctatcatagtaccttgatcaatatatgcacctatatttatataagaaggcataattattgtattataattaatgaatgcaccatatcttattgttgctggtggtactattctgactttttcttttttaaattgtttttcattatatttttcatattttaatggaactttatcatagtaactagtgtaactaccttctataaatttattttctttaatatatatatataatagaactgctttttttaaccattcgtgtgtaatccaagtattatcttttttttctgaaattctaattatgccattatttaataatttaataacacgaaaaatagtttgtaagatttcataatcaaggttatttaggttaattttatttttattttcataagtttcttcaattatttttttaagttctttcatattttaatgtgacctaatttattattaatgaataagaaaaattgttaaattatcaataatttaatttatattaactaatttttgagaaatatcttcatccttttgccatgttaaaatatcacatccatattccgttactaatacagtatgttcatattgagctgataaagaacgatctttagttttcacagtccatccatctttcatacattttacttctggatttccagaattaatcattggttcaatagtaaaaatcattcctttctttagaataatattgttttttttatttttataatgtaatacatgaggttcttcgtggaaattacgtccaattccatgtccacaatattcttttacaacagaaaaattgttgctttcaacataattttgaataatttcgccaattttatataacggtatacctggttttactagttttaaagacagatataagctttctcgagcaacttgacataaacgtttagataaaatactagtttttcctatataaaacatttttgaagtatcaccatgataaccatctttaatgatcgcaatatctatattaactatatctccttctttaaatacttgatttttacttggaataccatgacatactacatcattaatggaaatgcagattgattttggaaatccatgatatcctaaacatgccgaaatagctttttttttataaacaatataatcatgacaaatttggttgatatcttctgtactaatttttggctgaagatgttcttttatcatttctaatacttcagccgctaattttccagatatgcgcatttttttaatttctgattctgttttaattatgcaactcataatatttagccgtttttttatatcaatttctcagatttaagatatatttaaattatactgtaaaaatatatatattttaaaaaaattaattataaattatatgaaacatcaataattattggttttattagcataaaaaatgatataaattactttatatggtatatcaattaaaattaaaaattaatatattaatctttattttttatttaagataatatttacaaaaaatttcatattttaaaaaattttagaggtaatcatggaaattgtatcaatgcgcgagatgttaaaagcaggagttcatttcggtcaccaaacacgttattggaatccgaaaatgaaaccttttatttttggtattcgtaatagagtacatattattaatttagaaaagaccctaccaatgtttcatttcgctctatcagaattaaaaaaaattgctttgaagaaaggtagaatattgtttgtaggtactaagaaagctgcaagcaaaggaataaaagaagtcgctattaattgcgaacaattttatgtaaatcatcgttggctaggtggtatgttaacaaattggaaaactgttcgacaatctataaaacgtttaaaagatctagaaatagaatctaaagatggtactttttctaaattgactaaaaaagaagctttaataagatcaagagaattatttaaattagaaaatagtttaggaggtattaaaaatatgggaggattgcccgattgcttatttgttattgatgctgcacatgaaaatattgcaataacagaagctaataacttaggtattcctgtattttctatagttgatactaattctaatcctgatggtgtagattacatcatacctggtaatgatgatgccattagatctgtgaatctttatttaaaatctataatgcttacaatttctaaaataaataatcaaaattcgttagataaagtttttattgatactaaaaacagtactaatattgaatagaaaatatttattaatattttaaatattaatttaataaagtcataataaactatttataaaaaaggaaactaatatagtgaaaaccaatgttgatactggtcttattaaagaactaaggtctcgtacaggagcgggttttttagcatgtaaacgagcgttattagaagaaaatggagatatcgaatcggcaattgataatttacgaaaatcaggaaaattaactgctgaaaaaaaaattaataatattaccaatcaaggtgcgattttttctaagattaaaaataacattggcgtcatgcttgagttaaattgtgaaactgattttgtgtctaaagacaacttgtttatttgtctaggcgaagatattctagtagaagcattagaaaaaagaataaaagatatcaatcaattaaaagttatttttgaatcaagaagaacggagttggtatcaaaagtaggcgagaacattaatatccgtcgttttcatttaatagaaggtgaaaatattttttcctatcttcatggggttcgtattggagttttagttagttctagttcgctaaataaaacaatattaaaaaatattgcaatgcatatagctgcaagcaaaccagaatatttacatccaaaaaatgtatctagtgaggtttttcaacgggaatatcaaattcaactagaattagctaagaatttaaataagccttcaaatttattgaaaaaaattatagacgggagaatggaaaaattcgttaacaatatctctttaactagtcagagctttattatgaaccctataaaaacagtaggagatattttaaatgaaaatcatgcacatattgaatcatttattagatttgaattaggtgaattagtatctaaataaaatatagatttaaaaacatattaatataaaatatatttaggttgagaaatatgtctactgataagaaattcatataccgacgtattttattaaagataagtggagaggtattacaaggagttaataaatttggtattgatataaattctttaaaaagaatagcaaaagaaattgaatttatagtaaaaattggtgtacaagtcggtttagttatcggaagtggtaatttatttcgtggtgcaaaattatctaaattaggtcttaatcgagtagcttcagatcatataggtatattatcaacagttattaatagtttagccatgagagatacaattaattccatctcttctattaaaacttgtctaatgtctgcaataccattaaatggtatttgtgaaatatacaattatgaaaaagcaatgaatttattatctaatcatgttgttgtaattttttcagctggaacaggaaaccctttttttacaacggattcagcggcttgtttgcgtggtattgagacagaatctgatattattttaaaaggaaccaaagttgatggggtatattcaaaagatccaaataaagattctcatgcttttctatatagaagactgacatacaaagatgtcttaaaaaaagagctaaaaattatggatttagccgcttttacacttgctagagactatcatatgccaattcgagtttttaatatacatactcccggttctttatatcgcatcatcatgggagatgatgaaggtactcttattacgagataaattttgaaaaaaatttagaaaaattcattttaaaataaaacattttattagattaaaaaaaatattatataggtaatcatgtgattaatcagattgatataaaaactcgtgaacgaatggaagcatgtattcaaacgtttcataataatattaccaatattaaaacgggcagagcatcaccgacattgcttcataatatttatattgaatattttggatctaaaactcctttacgtcaagtgtctaatataatagttgaagattctcatactcttaaaatcaatgtttttgatgattcgattacatctttaattagaaaatctattttaaattcaaatcttgatttgaatccagttttacaagggaaagatataattattccgattcctagactaacagaagaaagaagaaaacaattaattaaagtaatccgtggtgatgctgaaagtagtcgcattcagattcgcaacattcgcagagacgcaaatgataaagttaagagattacttaaagataaaattattagtgaagataatgagcatacttcacaatcaaaaatacaaataatgacaaatgaatatattaaaaaaatagactgtattttagaaaaaaaagaaaaagaacttatgaaattttaatatttgatacttaaaatatacatatttgatataataaaacatacattaaaaaattattaattttttataattaagaatatttatgaagaaaatcactattttaggatctactggttccattggtattaacgcgctatctattattcaaaaaaatccagatttatttaaggtaattgctttagtagctaataaaaatttttctattatgttacgtcaatgtgagttattttctcctgattgggtggctatgagagacgagaaatctgctcatatattaagaaaaaaattaaaacatagtaaaatcaatactcaagttcttactggagaaaaagatatttgtgcgttagctgcattagaagaaacagatcacgttatatctgcaattgttggaatggctggtttgttaccgacgttatctgcaatacatgctggcaaaacaatattattagctaataaagaatctttaattacaagtggttatttttttatgaaagcactttcttcaagtggcgcgaaaattattcctattgatagcgaacataatgctatttttcaagtgttacctttagaaattcaaaaaaacttaggtaaaactactctagagaaaaatagtatcaagcatcttgttttaactggttctggaggtccgttttataaattttcttcatctgatttatctaatgtgactccagatcaagcttgttctcatcccaattggttgatgggaaaaaaaatttctgtagattcagctactatgatgaataaaggtttagaatatgctgaagcaagatggttatttaatgctttggaatcagaaattaaaattttaattcatcctgaatcaattattcattctatggtgcagtattatgatggttctttattagcacaattatcagtacctgatataagaacatctatttcatatgcaatgtcttggcctgaccgtatttgcacagaagttgattatttaaatttttataaaataaataatctaacttttttcgaacctgattttactcagtttccatgtctaaagttagctattgatgctttttctcaagggcaggcttctatgacagttttgaatgccgctaatgaaattgccgtgtcatcttttctcgattctaaaatttcttttactaaaatttatgaaataaatatggaaatattaatgtcttcctgtttttccgaaccaaagtgtattcaagacattctagaaattgacagaaaagtaagaatattagcaaaaaataaagtatcatctttaattttttaaacgtacattatgttaatgtactaattcatcaattatttaattcaaaactttttttaataaaattttgtttttgagagaaacatatacgtactatgcagtataaatatttattagaatacaacaaaaaaaatcatgaatgtaatccttgtcatgtagcaattattatggatggaaatgggcgatgggctactagacaaggaaaaattcgtattatgggtcataaagaaggttttagagcagtaaaagaagcaatcaaattttctattgcaaataatttaaaaatattaactttatatgcttttagtagtgaaaactggaatcgtccattatttgaaattaaagcactaatggaattatttttatttgcgttagatactgaaattaaaaatttaaaaaaacataatatcagatttaaagttattggtgatataacatgtttcgataaaaaattacaaaatagtattcattatgcagaacaaattacttttgacaataccggtttaattttaaatatagcagcaaattatggtggaagatgggacataattgaaagcgttaaaaaaattattaatcgagtgcagagaggaatcttagatgtaaataaaattcacgaaaatactatttctcaatatttatctactagtgaacttcttccagtagatttagttattagaacaggaggagaaaaaagaatcagtaattttttattatggcaaatagcttattctgaactatattttactgatgttttatggcctgattttaattgtcatatttttcaacatgctatagattcttttgtatctcgtgaacgtcgtttcggaggatttaaaaaaaataaaaaatagaaaattttataccatgaatatttttatataaataaaatttaaatgtatatcaaataataacattattaatccattaaaaaaatatttttttttactaaataagtttataaaaagtataagaaaataagtgtatttttgaattttattgttacttaatagtatctcttaacttgcaagtattttaaaaaactttataaaaaaagagatttattgtagggaaaattataataataatgttaataaaaaatttttttatagcttttttgatgttttttagtattttagttcatgcggaaaataaatttattgtaaaggatattcagttcaaaggattaaaaaatttttcgcaaaatgaagcattaaaaaacattccttttaggattggaagtacaatatctcaatatgatgtaaaaaatagtatcaaatctttgtttaaaacgggaaaatttgaagatattaaagtgtcatttttaggaaaaactattgtctttaatattagagaaagaccgattatttctaacgtcattgtttctggtaaccatattattgccagttctgttttagatccgtatctaaaaaaattaaatattgaaacaggaaaatcatttaataatttttttactaatgtattaactaaaacgataaaagatttctatcttgatattgggagatgcaaacccgatataaaaatattaaaaattttttctaaaaacaacagtgttagtataaaaatactcattaatgaaggaacagaaataaaaattaatagtattaaaatactcggcgttcaagccttttctaaagaaaaaattctttcattattcaaattgcaagattatcattcttggtggaatttattaagtaaatctacttattctccaaaagaattaaataatgatttagaacatttaaaaaatttttatttgagtaatgggtattattattttaatgtaaacactaaaaaagtagattttttgcaagataaaaaacaggtggatatcacaataggtgtttctgaaggaaagaaatacaaaatttccaatttttttgtcaatggaaatttattcccatatcaaaaattaattacaaatttaattaatattaatcctaatgaattttataatcgagacaaaattgatattatagtaaataaaataacaagatttttatctgaatatggatatgttaatactaaagttatagttgacccgcaaattgatcataaaaagaaaacaatagccttaaattttaatattgatatgaaaaaacgttattttgtaaaaagaatttattttacagggaatgaaataactcaagatagagttttacgtcgtaaaattaaacaaatggaaggtaaatattttaatacaaaattagtagaattaggtaaaaaactattagaaaaaacaaaatattttagtgatgtaaaaatcattcaaaaattaaattcttatgattctaatcaaattgatattacctatcaagttaaagaacagactactggttctataaattttggtttaggatatggagtagatagtggtaccagttttaatcttgctttttctcaagataatatatttggttctggaaattctttaaaagtcgatattattaaaaatgattatcaaaaataccttgatatatcaacaagttatccatattttttttataataatgcagatttaaatgccagatttttttacaatgattttaaatataattttgacaatatttcgaatattataaaaaatacatatggttttgaaggtaatttgggatttttaattaataattataataaggtaaattttggatttggatatacacataatagtattaataatgaagagaaaaaaatacatggtaagtttacaggtgaattaaatataaataaattgtattattttgtaggtgtagacgatactcgttttaaaaaaatcgcaataccaggtgatcaaatatttataaaagtaactattttaaaatctaataaaaatattttaatttttaaaaatatagctgtagtaaataatgatattatttgtaaatctaaaattgtttttgctaaaaaatacttattttaaaaacatatatttacatataaatttccggaaaaatatatgaatgaaccaaaatttattcatcttcatgtacatagtgattactcaatgattgatggattatcaaaacctgaagatttagttaaaaaagcagcatctttaaatatgccggctatagctataactgattacaataatttatatggtgtaattaaattttataatatggctcataaactaggtttaaaacctattattggtattacagtaaattttttttctgatttgataaataatcaattaacaaaattaactttattagcctccactcaggaaggatataaaaatttaattttattaatttctcgtgcatatcaaaagggatatgttcataataatcatgttactattgaaaaaaaatggttttcagaaattaacaaaggattaatattactttctggtggccctcagggtgaacttggaaaagttttgcttaatggtcaatcatcattgatatctatttgtttgtcattttatcaaaagtattttccggattcttactatttagaattatttcgtacaaaccgagataatgaagagacatatttacatttagctgtagatttatctttatctacaggagttcctattgttgctactaatgatgtttgttttttaagtcaagaagattttaaaattcataaaattagaattgctatcaatgaaggtgaaatattacaacattctaaaattcaaaataattatagcaaccagcaatttttaaaaactacggaagaaatgtctgatcttttttcagatattccagaagcacttataaatagtgtagaaattgcaaaacgctgcaatgtatttatacattccggaaaatattttttacctcagtttcgaactggaaaaataagtgttgaaaaatatttaattaaagaagcttataaaggtataaaaaaaagattaaactcaagatatctagatattgaaaaatataaagatatttacagtcagtatatcaaccgtttagatatggaattaactgtaattaacaaaatgggttttcctggatattttttaattgttatggaatttatacaatgggcaaaagataataatataccagtaggaccaggacgaggttctggtgcaggttctcttgtagcatatgctttaaatatcacagaagtagatccattatcttttaatcttttatttgaaaggtttttaaatccagaacgtatttctatgcctgattttgatattgatttttgtatggaaaaacgtgatcaagtaattgatcatgtttcagagatatatggtaaaaatgcagtagcacaaattattacctttggaacattaactgcaaaagctgttattagagatgtaggtcgagttttaggatatccatatggatttattaataaactatctaagttagtacctttagatcccgggataactttaaaagaagctttttccaaggaatctgaattattcaatttatataaaaataatgaagatgttaaaaatttaattgatattgctaaaaaattagagggtacaaatagaaatattggcaaacacgcagggggagtggttatttcacctactaaaattactgatttttgtccattatactgtgatgaaaagggaaataatccagtaactcaatttgataaaaatgatatagaatatataggattagtaaaatttgattttcttggtttacgcacactaactattattagctatgcggtagaaatgattaatacaaaattaaatctgaataaaaaaagaacaataaatattaattcaattcctcttgatgacgctaaatgttttaaattattaaaaaattctgaaactactggtgtgtttcaattagaatcttatgggatgaaagatttaattaaaagattacaacctgattgttttgaagacatgatcgctttggttgcactttttagaccaggtcctctacaatctggaatggtcgataattttattaatcgaaaacatggacgtgagaacatttcatatcccgatcataaatggcaacatatattattaaaacctatattagaatcaacatatggaattatattataccaagaacaagtaatggaaatagctcaagttttgtcaggttatacattaggtagtgcagacattttaagacgagctatgagcaagaaaaatttaaaagatatgtcagaacaacgtgctatatttgaagaaggagcctcaaataatggtatcgataaaaaattatctataaaaatttttgatttactagaaaaatttgcaggatatggatttaataaatctcattctgtagcttatgctctagtttcctatcaaactttatggttgaaatcacattatcctgcggaatttatagctgcagctatgacatctgatatagataatacagaaaaaattgttattttaattaatgaatctctaaatatgggggtaaaaattatccctccaaacattaatttaagtaaatatgaattttatgtaaatgatcaaggtgatatagtttatggtcttggtgctatcaagggtataggcaaaaattcagtgcaagttcttattaaagaacgtgaagaaaataaattttttcatgacttatttgatctttgtatgcgaattgattctcaaaagataacccgtagagttttagaaaaattaattatgtctggtagttgtgattgttttgataaaaatagaaattatttacttcaatcaattgatgatgctataaatgcgtcaaaagaatcttttagaataaagtcttttaaacaagatagtctttttggtatttttcaaaatgagttaaatcaagtaaaaaaaaataatcttgttaatttagtctgccctgaaaaaaataaattacaaaacgaatatcaagtattgggattttatcttacaggacatcctatcaatcaatataagaaagaattagaatgttatgtaaatggtgtaaaattatcacagttaaaattcatcaaaagaaacaagaaaattttagtagcaggaataattgtttctatcaaaataaaaataacaaaaaataagaatcgtatagctattttggtattggacgataatactagccgtttagaagttgtgatttttacagaattattaaatgcatatgagtctcttgtaaaattaaacaaactattgtttgttcacggtatgttaaatgtcagtttcattgataaaaatattaaaatgacggcctatgcacttatagatttaagtgttttgagaaaaaaatacataaataaactaataattatattaaataaagagaaaacaaacatattttttttaaataatttatacgaatgtttagataaacaatctaaaggtaatattcctgtttttatttttttcgataataaagaagtatgtttaaataaaaaattaaataaaaaatggtttgttgtaattactgatgattttttaaataaattaaaatttttagtaggatctaaaaacatagaattaaaatttaattaataaaaaatttttgatattataaaataaaattttaatcaaattttttaaaaaaatttgatcaataatattgtcaagtagaaatacggtttttaactagttattttttagattcaatagttttgcacctttactttttaagtttttggataataaaattttttatatcttttatattaattaaaatattttccttattttttctttcgcgatattcaacattatcgtagttaattgaacgtttgcttataataatttgatgtggaataccaattaaatcgacttcattaaacataactcccggtctttcatctctatcgtctaatataacgtctataccagtttttttaaactttttatataaaaagtgtgctattattttgattttattatcttttttcatatttataggtaaaataactacttcaaaaggtgcgatagaatctggccaaataataccatttttatcgtgatgttgttcgataacagcagctgcgatgcgcgttatgcctattccataacatcccatatatagattttttagattaccattttttatctttacagactgttgtatttttctagaatatttttgtccaagttgaaatatatgaccaatttcaatgctttgttttatatttaaatatcctgaaccattaggactcaaatcattttttgttacttttctaatatctttaaatataggcatcggcaaatcaatattccaatttacgttgataaaaaaatgtttattaatatttgaaccaatagtaaaatttttcatattaaaagtagaaatatcagcaataatgggaacttttaatcccaaaggtcctaagaattctttttttactccaattagtgaaatgacttctttttcattaagaaatactaaaggtttattaattatatcaattttttctactttaaaaaaattcaattcatgatctcctcgtattaataatgcagctattgaagtaatatcatttattttggtttgaattaaaaaagtttgaatttgattaattaatggtgtgtttaatttttcagacattattatagattttttggtgtttgttttatttttaatcaaacaggatgaatatttttttttaaaaaaatcaattgtttctatagattcagccatattcatgtttgaagaatataacttatcattagaaaacactatttcatcttctccattttgagagaaagcttgaaattcatgtgaaatattgcctcccatagaacctgaatcagcttttactgcacaaaaatttaaattcatttttttaaatatatttatataactatcataaaatttattataagtattttctaaacagctttgattaatatgaaaagaataagcatctttcatagtaaattcacgtgttctaataattccaaaacgcggtcgtatttcatctctaaattttgtttgtatttgatatacagttaagggaagttgtttatatgaatgaatttcagaaccaataaaattagtaacaacttcttcattggtgggacctaaaataaattggtttttacgccgatcaagaaatcttaatagttcttctccatatagatttaaacgtcggctttctttccataaatattcaggttgtataataggcatcaatatttctaatgcatttattttttccatttctgtcgtaataatattttttattttttttaggactctcattccagttggcagccaaacatataaacctgaagatgtttttctaatcataccgcttcttatcattagttgatgactaataatttttgcgtcgtagggtatgtcttttgaagttgataataaatattgacttgtaagcatcttttaaactctcaaaaataaaaatttttttattaaaaatagaattgtatgtttaaaaaaatttgtttttgcatagtaaatttaattttactatatgataagatcttttcttaaataatttatttaaagttaatatatatcaaaaatataaatatatagaattttcaattatcataaaaatgatatttttttaaaaaaataaagatcaatatattatgttaatatttttaaaaaatagatcaagtctggttgtttctttagcaaaattaacttgttttttttttagtacagaggtttaatgaattttttatgtataaatagtggttaaaaatatttacaatgaatcataatacaaatgaagaaaaaacagaacatcccacagagcatcgcatcagaaaatttcgtaaaaaaggaaaaacaagatattctagggaattgagttctttatttattttgttagttggttttataaatttatggtggtatagagatttaattgttttaaattttagtaaaataatgtccgatagttttctttttgaaagtaatgattttttaaataacaacaataatttattaaaaatattaatgtctctaaaagagatactattttctttttttccatttttaatatctttattaattgtaattatcatacctcctatactttttagtggaatcagtctaaatttcagatcattaaccttaaatttttccaagttaaatccatttcatggttttaagagacttttttcttttcaaataatagtggaattttttaagataatactaaaattatttatagtgagtattatatctttttggtatttacagttttctttttctgaaattttatttttagttaatgcaaattatgtatcttcattatcacatggatataatataattttttcttgttgttttttagttatactaggcttatttcctattgttttttttgatatagcttggcagcaatttaactactataaaaaattaaaaatgactcgtcaagaaatgagggatgaattaaaagaaaaagaaggaaatccaaatataaaaatgcggattcgtcaagcaatgaaagctgttatgcgcagaagaatgattatcaatactcctaaagctgatgtaattatcactaatcctatacattattctgttgcattaaaatatgatgaaaaaaacatgaatgcacctaaagttatagctaaaggtataggagaggctgccatcaaaatacaaaatttagctcttaaacataatatttctattatctctgtaccatcattagctcgttcattataccgttattccgaaataggacagtatattccaggtcctctttataaagctgttgcagaagttttagcatgggtttggaaagtgcgcaaatggaaaaaagaaggaggtattttccctgaaaaacctatcaatatatcagtcccatcagaattaacgttcacaggagaacatgaaactaatgattaatttttcttctcttttacgtattgtaaaaagtttaaaaacaactcaatggcaaatacttgctggtccaatacttattttaatgatcttatcaatgatggttttaccattagccccctttgttttagatgttttttttacttttaacattgctttgtcaataataattttacttgtttctatgtttacgcgtcatactttagagttcactgcttttccaacaattttgcttttttctacattgttgcgtttagctttaaatgtggcttctactcgtgttatttttttaagaggtcacacaggcaccaattcagcaggaagagtaattgaatcgtttggtcattttttagtaggtggtaattttgctattggaatagtggtatttataatcttagttattattaattttattgttattacaaaaggtgctagcagaatcgcggaagttggtgctcgatttatattagatgctatgccagggaaacaaatggcaatagatgcagatttaaatgcaggtttgattggggaagaaaaagctaaaaaacgtcgtataaaaattacacaagaagctgatttttacggttctatggatggtgctagtaagtttgtacgtggagatgcaattgctggcattttaataatggtcattaatatttttggaggtttaattattggcttaatacaacatcatatgttcttaaacaaggcagtagaagtctatactttattaactatcggagatggtttagttgctcaaattccagctttagttatttctactgcagcaggtgtgattgtaacacgtgtaagtagcaatcaaaacgttggagaacaaatggcaagtcaattattttataatcctcaagttattttattaagtgcgatagtattaggagttcttggtttagttccaggaatgccaaatattatctttttagtatttacagttttattatttattctttcttggtggttgtatgaaaaaaaatatgatctagaaaatgattttataaaatctaataaaaaatataaatttatacatgatgccatctcagaagcatcttggaatgatgttgaattagaagatccaattcgaatagaaataggttacaagttaacaccaatgactgatattaataaaaaaggtgacttattagatagaattcgtatagttcgtaaaaaagttgctcaagaaattggttttttacctccattagtacgtattaaaaacaatatgcatttatctggaaattcttatcgtatttttattaaaggtgttgaagtaggtcaaggaaagtgtttttatggacgttttatggcgattcattcaggccgtgaaacagaatctttgccttttgaaaaagtatatgaacctacttttggtttatctggctattggattgatgaagaatttaaaaataaagctcaaaaaaagggttattctgttatagaatctagcgttgtactttcaacacatttaaattttttaattactaatcatattgatgatttatttggtcgtcaagaagctcaacaattgttagaacgcgttacgatagaccatccaaaattaactgaagatttaattccaaatacaattaatttaaccatttttcataaaattcttagaaatttattattagaacatgttccaatacgtgatatgagaactattttagaaacattatctgaacatgcggatactcaaaaagatcctaatgaattaactagtatcgtgcgtattgcattaagaaaaattattatacaaaaattatttaatcaaaacaatattatcgaaataataggactagaacctaatttagaacgattattactaaatagtttaaaatctggaactgatactatagaacctaatttatctgaaaatttgttaatacaaacaaaagaagcgatcaaaaaacaattgttaataggttctcctctagtgttattagtccgtcattctttacgatattttttatcaaaatttttacgtcaaaattttccagaactaactgttttgtctcaatttgagattatagatgtaaaagaaataaaaatgactaatattattggtacttcatgatagataaaattagttttttgtatacagattggtgcggtgataagtagtaccatgttagtgctacattatttcctcaccttgctggttttttaggacaaatagatgtcatataaattaatatttttacattttttttactactctaataccaagcatattaagtcctttttttaatgttttagctgttaaaatagataatttaagtctacttttacaagtttttatttttttgggaaaaagtatagaacaattctcataaaaatgagaaaaactagttgcaagatgataaagatacttacataaaatatgaggggttcctttttgagaaattaataaaatgatttcttcaaattctaatattttaattgctagattaatttcgctttcttttgttaaaaaaatcttttcttttagtttctttataggcatattagatttttttaaaatagaaacaattcttgtataagcatactgtatatagggcgctgtattaccctcaaagcttaacatttcgttccaatcaaatatataattagtatttctatttttagataaatctgcgtatttgactgcgccgacaccgatgatattagataattgatttagtttttttttagataagttaggttgtttatttttaattaaacgcatcgccctttctgtagcttcatcaagaagtgcagaaagttttatagtatcaccatcacgagttttaaatggacgtttatcttttgatagcatcattccaaagatatgatgttctaataataaattttgagatatataaagagcttttttggctatagtccacgcttgtagtaaatgctggtgctgtcgagaatcagtgtaatatataatacgatcggcatgtaatacttgatatctatattttaaacaagcgatatcagtagtagaatataaaaaccctttgtcttttttctgaataacaacacccatgggttctcctaatctattcttgaattcttttaaaaaaacaattgtagaaccgtttttttctattgctatttttttattcttaagatcttcaataatattaggaagcattttattgtatatactctctcccattgtatgttttttttttaaagtaacatgtagccttttatatattttacaattttctaacattgtgatggatactaattttttccaaatagaataacaatattgatcaccattttgtaattttactacgtattctctagatttttctgcaaataattgatcaatatcatatttttttttcgccttgcagtagtattcctctaatttcataagggataaaggactatttacgagttttttaacttctaaatatgcaatcaacataccaaattgagtaccccagtcaccaatatgatttgctctaattacattatgacctaaaaaatctaatattctagccataacatcgccaattattgttgaacgtaaatgtccaatatgcatttcttttgcaatatttggcgaagaataatctattacaatattttgtgcatttacgtgatttatgccaagacgaggtgaaagaaaaattttttctaattgttcagatatccaatatggattaataagaaaattaataaaacctggttgagagaatgttatttctttatacatgtatttttttttaatattgagaattattctattagctaattcaaatggttttaagtttgatatattagctatttttattagattgttaagttggtaatgccctatttttgtttttttatttaatgtaataacgggatcgcagtttatgatagcaattttaattaaagcatcttggatatcttctttgattgtatttttcaagttcataataaaaccttgttttgtatgatattaaatgaaacatattaaccttattctctaaaaaataataaaatatatgtttaaataattacttatttaattgagctataatttaaattaatttatcatatatgttctattttattaatttttaattatttattaattattattttagaaaatttttcttgtattaaatataaaaacaatcttcttctacaaataaatgtaaaaattaaaaattttttcataaaaaggttgacagtagaataaaaaaaatgtaatctcttaatctaaagttttaaatataaaaacgctctttaaaaatatattagataatctgtgtgggcacagacaattaagtacaaaaaatttatttttttatttaaaatatcttaaagattttttctttaagattaaaaaagtttttcaattgaagagtttgatcatggctcagattgaacgctggcggcaagcctaacacatgcaagtcgagcggcagcgagaagagagcttgctctctttgtcggcaagcggcaaacgggtgagtaatatctggggatctacccaaaagagggggataactactagaaatggtagctaataccgcataatgttgaaaaaccaaagtgggggaccttttggcctcatgcttttggatgaacccagacgagattagcttgttggtagagtaatagcctaccaaggcaacgatctctagctggtctgagaggataaccagccacactggaactgagacacggtccagactcctacgggaggcagcagtggggaatattgcacaatgggcgaaagcctgatgcagctatgccgcgtgtatgaagaaggccttagggttgtaaagtactttcagcggggaggaaaaaaataaaactaataattttatttcgtgacgttacccgcagaagaagcaccggctaactccgtgccagcagccgcggtaatacggagggtgcaagcgttaatcagaattactgggcgtaaagagcgcgtaggtggttttttaagtcaggtgtgaaatccctaggctcaacctaggaactgcatttgaaactggaaaactagagtttcgtagagggaggtagaattctaggtgtagcggtgaaatgcgtagatatctggaggaatacccgtggcgaaagcggcctcctaaacgaaaactgacactgaggcgcgaaagcgtggggagcaaacaggattagataccctggtagtccatgccgtaaacgatgtcgacttggaggttgtttccaagagaagtgacttccgaagctaacgcattaagtcgaccgcctggggagtacggccgcaaggctaaaactcaaatgaattgacgggggcccgcacaagcggtggagcatgtggtttaattcgatgcaacgcgaaaaaccttacctggtcttgacatccacagaattctttagaaataaagaagtgccttcgggagctgtgagacaggtgctgcatggctgtcgtcagctcgtgttgtgaaatgttgggttaagtcccgcaacgagcgcaacccttatcccctgttgccagcggttcggccgggaactcagaggagactgccggttataaaccggaggaaggtggggacgacgtcaagtcatcatggcccttacgaccagggctacacacgtgctacaatggtttatacaaagagaagcaaatctgcaaagacaagcaaacctcataaagtaaatcgtagtccggactggagtctgcaactcgactccacgaagtcggaatcgctagtaatcgtggatcagaatgccacggtgaatacgttcccgggccttgtacacaccgcccgtcacaccatgggagtgggttgcaaaagaagcaggtatcctaaccctttaaaaggaaggcgcttaccactttgtgattcatgactggggtgaagtcgtaacaaggtaaccgtaggggaacctgcggttggatcacctccttaaaaatatatacttttttgaaagtgcccacacaaattatctaataaaaaaattagaaggcttgtagctcagatggttagagcgcacccctgataagggtgaggtcggtggttcaattccactcaggcctaccaataaaaaatcatctggggctatagctcagctgggagagcgcctgccttgcacgcaggaggtcagcggttcaatcccgcttagctccaaaaatctttttttaatcttaatcttttaaaaacttcaaaatcagtgcacgtactttttaatccaattgatttcttaacataattatcatttgttcttaaaaataaattaatttttttttcgaaaaaaatataagaaggcaagctagactgacctagtttcaattttatttcaattttttttaaatataatttaataaaattatcattaggcaaaataaacatagaaaactgtaaattagataatgtgtattcatgagaacagcacaaaagagtgctatctggaagagacgaaataatttttatagaacgatacatttctaaatgtttatttttaaaaacacgtccgcaacctgccgaaaataaagtatctccgcaaaaaatatatggttgactataataagaaacgtgacctgatgtatgacctggagtaaaaaaaacataaaatatcttatctaataagataatcctatctccatgagatacaattttattgacaccgtgctgtcttgtttcttttggtccaaaaacgcttatttttggaaaatattcaataatttttcttgttcctcccgtatggtcaatatgattatgagttaataaaatagctcttaggcgccatttttttctctctatttcttgtataataggctcagataatccaggatctataattatgcaggaaccgctggtatttaaaagaacccaaacatagttatctgataaaatcgatattttttttaatatcataatttttttatattttatttttattcgaaaaaattaaaaattataatttactattttcatagtaagtatcttttattgaaggatttttagcagactgccgtgctatcatatcgcatctttcattttctaagtgcccgatatgagctttaacccaaaaccaagtgactaaatgttttttaagagcagtattaatacgtaaccataagtctatattttttacagatttttttttggcagttttccatttttttttttccatataggcatccaatcaataattcctttttttacatataaactatctgttgtaatttcaacatgacatgattgattaagaaactctaatcctgatattacggccattaattccatgcgattattagtagttaaatgaaatcctgaagttaatattttttcatgctttttgtagcgtaaaattgtgccatatcctcctgcaccaggattacctaaacaggacccatctgtaaacattttaactatttttaacataataatagtaattccaaataattttaattatatttacgtcattgaaaatattatgaatagaaaaagaacaattatattagatacagaaacaacaggtataaatcaaacaagtcttcctcatataaaccatagaattatagaaataggagctgttgaaatcattgatcgttgtttcacaggaaataattttcatgtatatattcaacccggcagatcaatagagtctggagcattaaaagttcatggtattactaataaatttttattagataaacctatttttaaagatattgctgattcatttttaaattatattaaaaattctatattagttattcataatgcttcgttcgatgtaggatttataaatcaagaactagaaatattaaataagaaaatcaaaattaatacattttgttctattattgatacattaaaaattgcccgggaattatttcctggaaaaaaaaatacattagatgctttatgtacacgttataagataaataaatctcatagaaatctacatagtgcgatagtagactcttatcttttaggtaaattgtatcttttaatgactggcggtcaagattctttgttttctgataatacaattaattataaagaaaattttaaaaaattgaaaaaaaatattcaattaaaaaataatactttaaggatattacatcctacactaaaagaaaatgatttacatgaaaaatatctacaatacatgaaagataaaagtacatgtttatggaattaattataaaataaatataaaaaagatcattgactgatttttttaaaatatgtacaatataaagatacaaacaaggtgtggtagttcagttggttagaataccggcctgtcacgccgggggtcgcgggttcgagtcccgtccgcaccgaaaaaaatattatataaatatgttattttaatactaaatatttacttattttccattaaaaagttgaaaaatttaaaattatgtataaaaaaataattttttctgaatttaactctgcgtcaaaaatattaaaaaattttttagaagataaaaaacaaatagaaaatattcaaaaagcagctattctaattgctcaatcatttaaaaacgaaaaaaaagtaatttcttgtggaaacggaggttcacattgtgatgcagtacatttttcagaagaattaactagtgtatatagaaaaaaaagatccggatatcccgcaatctccatttcagatagtagttatatttctgcagtagggaatgattttggatacgatcaaatattttcacgatttattcaaagtgttggtcatttaggagatatattattagctatttctacttccggaaattctttaaatatagtaagagcaatagaagaagcaaagaaaaagaaaatgaaagtaatcgttttaacaggaaacaatgcaggtaaaattaaaaacttatctgatatagaaatttgtattcctcattgcgggtattcagatcggatacaagaaatgcatattaaaattattcatatattaatattaattatcgaaaaagaaatgcaaaaaaattaacgaattattcaataattaatcgttactacattaaaatcctataataattttcaagtaatttccgctttttaataaatactattttatagtttcggaatttcttttcatgagtgagaaatacattgtcacctgggatatgcttcaaattcatactagaaaactagctaaccgattagttaaaaaaattcattcttggaatggaatcattgctgtaagtagaggaggtcttgttccatcagctttgttagcaagagagttaggtctaagatgcgtcgatactgtgtgcattgaaagttataattatgattgtttaaaagaaaatagaaaaatcattaaaaaagcagaaggtaatggagaaaaaattattgtaatagacgatctagtagatactggtggcactgcaaaaattattagaaaattatatccaaaagcatgctttgtaactatttttgcaaaaccaatgggtcgttcattagtagataattatattatagatattcctcaaaacgtatggatcgaacaaccatgggatatgtccatttcttatattccccctcttattcaaaattataaaatcaaataaaaaaataatattatttctcttaagaaatctttaatataatgattgttaatgaaaataaaattttccaaaataaatacatactgcaaaaaaggatgtttttatgatacataacgaagaagaacaattagaaaaaaaaattgaaaaaaatcaagatccaaaaataaatcataaaaaatatgacagtgataatttaataaaaaaaaatttaattcaatttttagaaatacaactaaaagaatctgaagaaaaaataatagaaaaagaagaaatagttgaaaaagaaatagtattaatacataatagatttaataaagagattgaaaaatctataaaattttctttagaaaaaataattatagacttccttcctattattgataatattgaacgtgcattaaacttaatagaaacaattaatttaaaacaagaaaagtacacagaaattttaaaaaaattgcaatttatttgtaatctgttagaaaaatttttttatttatttaatattaaaaaaattaatgatacaaatgtattgtttaatccgtctattcatcaagcaatgtctattcattatactaatgacataatatctaatcaaatagtcacagttatgcagtcaggttatattttacataaatctcgtttgttacgtcctgctatggttgtagtgtctaaagaaaaaatataaaaataatatgttttttaggtttaataatattgtaaagtattttaattgttattaaatctaaaaattttattaaaaatattaatatattttttttaatttttttgataaaaaaacattatttcttctccattcttttggatctatagttaaatttctataaatttcaattctatctccatctttgattttgaattttaaatgtacggtcttattgtatattcctattctgttgtgatgaaatgaaacgtcatttgttaaatttaacaaatttgattttaaaatagcatcttttacagtagatcctaatgcaatatcaacctgacaaatatattgaatttttggtaaagcatagacaacggttacttttatgatcttcatatttttataaatttttttattttttattttttaattttatataaaaagattgtttttattttaacttattttacttttggaataaattaaattatgttgcaaaaaaaaaaatatcaaaaaaaatcatctaaaattataattaataaaaaagcatattataattatttcatagaaaaagtatttcaatccggtttagttttagaaggctgggaaatcaaatctattagatcaggtaaagtaaatatttcggaaagttatataataaatgatcgtaatgagatgtatctttgtaattgcttaattgaacctttgcaaatgtcttcaaatcgtttttcttgtgatccgacaagaaagaaaaaattattattgcataaaaatgaaattgattttttatctcttaaaaaaaaaaatacaggatacacaatggtatcattatctctattttggaaaaaatcttggtgtaagttagaatttggattagctaaaggaaaaactgcacaagataaaagaataaatttaaaaaaaagagaatgggaacaagaaaaattaaaaatacttaaaaaaactaaagaaacatactaaaatattttatgaaatatgaaaaagataaaaattggatgaaaattgctttaaaatacgcatattatgctaaagaaaaaggggaaattcccataggtgcaatattagtttttaaggaacgtataatcggaataggctggaatagttctatttctaaaaacgatccaactgcacacgcggagattatagcattacgtggtgcaggaaaaaaaataaaaaattatcgattattaaatactacattatatgttactttgcaaccgtgtattatgtgttgtggtgcgattatacagagtcgtattaaacgtttggtatttggtgctaattgtaattcatcagatcatcgattctcattaaaaaatctgttttgcgacccacaaaaagattacaaattagatattaaaaaaaatgttatgcaacgtgaatgttccgatattttaataaatttcttccaaaaaaagagaaaaaataaaatccatatttgcaagaaaatttaattaattttccaaaataactaaagcataagcgtataatttttgatcagaaatacttacatgtatcgatttacattggatttctttagatttttttagagcatgttttaaaaagcgcaattttggtttgcccgatttatttttataaaattccagttgattgaatgttatttgatgatttatacctgttcctaacgctttagaagcagcctctttagcaacgaatttttttgcaagaaaactaatactatcatcgataagaatgtatttcttccattcttctgtagataaaatttttcttgcaaatttatctccatactttaaaaaaatatttttaatacgtaatatttctacaaaatctattcctatacctataattgacattataaagatacaccttatgtaaatataattttttatatttaaaaattattgatttttttaaaatcagttaaaaatttgaacttttaactaattttaaaaaattagttatattattctattaatttcaatttttgtctttaacccataagacaagatgagtttttatataaaatttcttttctatattatttcttgaaatcatactaattttttttattttctctccattatgaccaattacaatacttttttgccttacattttttacccaaattatggcttttatataaagtgctattttttctttctttttaaaagattctatttctactttaattatggaaggcaattcatctcctaaaaataatattaattgttctcgaataatttcagagactgtaaaaaaatcggaattagttgtaatataacattcaggatatatatgacagttttctggcaaataagatttaattatattttttaataatattaaattacttattttttttgcagaaatgggaagaatttctataaaatcaattttttttttgagaaaattgataaaaggcaacaaaataattttgttacttattttatcaattttattaataataattaaaattggtattttagttttctttatttcatttaaaattatttcatcatgtattgtccaatcaatccgatcaataataaaaatgattaatgttgcgatttgtgttgtttgataaaaattgtttttatgatgtttcatttgattgttatttttgtcaaaaactactccgggagtatctatataaattgattgataattatcttctgttttaataccggtaatattactctgtgtagtatttttttttcttgaaacaatagaaatttttttaccaattatattattgagtaatgttgatttaccaacatttgcttttccaacaattattacatgtccacaatattttttttttattttcactctacacctaatttaattaatgctttttgagctgcatcttgttcagcttttcttctactagaacctgttccaatcaaatattctgaaatggtactaattttacaatgaatggtaaatagttgattatgagcttcaccatatacttcaactataaaatataaaggcaaagataaatgctttgattgtaaatactcttgcaaccgtgttttaggatctttttgtgtgtctccaggactaattttttctaaacgtttttcataccattttaatattaattcttctactgttttaatgttactatctaaataaatacttccaattaaagcttctacagtattggctaaaatagattcacgacgaaaacctccactttttaattctccctgtcctaattttaaatattctcctaaatcaaattcatatgcgatttctgctaaagtatttcctcgaactaaagttgctctcattcgactcatatcaccctcatcgatatatggaaaatgttgatataaagcattggcgataacgaaacttagaatagaatcgcctaaaaactccagtcgttcattatgtttactactcgcactacgatgtgttaatgcttgttttaaaagatccttatgagtaaaagtatatcctaatactttttgtattttttttgtcacaatatgattcatgttataccaatttcaataatattttaattgattgtacatataacaaggaaaatagaaattttgataaaattgaaggtatacgctaatataaatattgactcttattatatttctattagattagtcttttctaatgtatacttccaattctatttatacgtataccagtaggccattcattttcatttttatcaaaactcatccatattttaatggcttttcccactaagtttttttcaggtacaaacccccaataacgactatctaaactattatcacgattatctcccatcatgaaatattcacctttaggtacaatccaagttaatttaggcatatttttttgttgaaaataattttcttttgtatttttaatactatttaatagtaatatactatgtttgacatcctcgattatttcttcaacaatatcaaaatataatgagttatatatgtttttatcttctttgatattgttcttattagagaagtatattttttgaataaaattactagatcgagattgggaataattaattgatatcttcttttcacatcctctctggtctgaataattcgtacatatatgtatgtgtttatcgtgaagatcatatctaattttatctccaggtaatcctattatacgtttaatataatttatattatgatcagtaggatgttgaaatactgcaatatcaccacgattaggttttttggtacgtattaatattttatgtgtaatgggttctttaataccatatgaaaacttttctactaaaataaaatcacccactaaaagagtaggcatcatagaacctgaaggaatttgaaaaggctcataaataaatgaacgtataataaatattgctaaaaaaattgggaaaaatgacgctaaagattttaagaaatatgttttattttttgatttttctattttttcttgatgaaaattattattgttaattatttttttattaattaaataatttttaaagcttttgatacaataaaaactccaaaatattccagttactaatgtactaattaacaaaaaaatagttaatatatttgccatggtattttcctttttttaactttctctagaatttaaaatcgaaagaaatactgttttaggcacattaacattacctatttttttcattcttttttttccgtctttttgcttttgtaacaatttcttttttctactaacatcaccaccataacactttgataatacatttttcctcaattgcttaatagtagatcgtgcgataacagaattgttaattacagcttgaattgaaatgtcaaattgatgtcgaggtattaattttttcattttatcaactatttcacgagaacgagattgtgcatttttatggtaggatagtattgttagagcatctaccttttctgagttaattaatatatctattcgtaccattttcacagattgaaaatatttaaaatcatattccaatgaagcatatccactagatacagattttagttcatcaaaaaaatttaatataacttcattcataggtatattatatttcaataatacttgatgtgaatgataaaccatattaatttgaacacctcttttttttatacataattttattattgatccaagaaattgaggaggtgatagaatactgcattctacgatcggttctttaattatttttatatcattcatattaggaaaattagaaggagtatctaaataaattattttcccattaataagttctatttcataaataactgtaggtattgtagtaattaaatcaatagaatattctctttccaagcgtgcttgaatgatttccatatgcaatacacctaaaaatccacatctaaatccaaaaccaagcgctactgaattttctggttcataaaataaagaagcgtcatttaaacttaattttcctaatgcatctctaaacatttcatattgatctgatgtaaggggaaatagaccagcatatatttgaggtttaatttttttaaaacctattatcatatttttggctggatttttagctgttgttaacgtatctccaacaggagcagcaatgatattttttataccacaaataatccaacctacttcaccacatcttaattggtttttatttaattttttaggtgtaaaaacacctatttgatcaacataataattttttcctgtgctcattacttgaattttatctctttcaaataatatgccatttttaattcttatcaaagatactacacctagataattatcaaaccaggaatcaataattaatgcttgaagaggggaatttattgaacctttaggataaggaatatcgttaataatacgttctattagatcttcgatgccttctccagttttagctgaacatctaattgcatccaatgcaggtattcctataatatcttcaatttctttagctactttgtctgcatttgaattaggtaaatctattttatttaatacaggaacaatttctacattcatatctattgcagtataacaattagctaaggtctgtgcttcaaccccttgagtggaatctacaactaataatgctccttcgcatgcagctaacgatcgagatacttcataagaaaaatcaacatgacctggagtgtcaataaaatttaaattaaaaatatttcctgatttatttttgtaatcaatcataacgctttgagctttaatagtaatgcctcgttctttttctaaatccattgaatctaatacttgattagacatttctctttcagataaaccgccacataattgtattaatcgatcagataaagttgattttccatgatcaatatgagctataatcgaaaaatttcttatacttttcatgttttttataccatattcatgtttaatacattttaacatgcagtaaaaaatattttttattatttttataaatttttaataaaaaatatactaggataaaagtttgtttaaaaataatatgttttagaaatataaaagataatttatttattcttcttgtttatgatatataatgtaatattaaatatattaaaaaatatctacaagaaaatattaaaattaatacctttaattatgataataaaaaaaaataaaaaaattattgttgctatgtctggaggggtagattcatctgtttgtgcgtggattttaaagaaacaaaattatcaagtagaaggtttattcatgaaaaattgggaagaagacgaccaagaaggatattgcagttctactaaagatttattagatgcagaaaacatctgtaaaaaattaaatatatatcttcataagatgaatttttcctcagaatattgggaatatgtttttgaaaactttctaaaggaatataaaaaaggaaacacacctaatccagatatattatgtaacaaagaaattaaatttaatatgtttttgaattattctattcaagaacttaaagccgattatattgctacaggtcattacgctcgtataaaaaagataaatggtaaatatttacttttaaaaggaattgatactaataaagatcaaagttattttttatatactttaaatagtattcagcttagaaaaattctatttcctatcggacatttaaaaaaaaataaagtaaggaatatagctaaaaaaatagatttaaaaatcgctaaaaaaaaagattctacgggtatttgttttattggtcctaaaaaattaaaaaattttttaagcctttatatttctgaaaaaaaaggtgatatagttacaatttctggacgagttattggcaaacatagtggagtgttttattatactataggtcaacggcagggattaggtataggcggaataaaaggagaatacaacataccctggtatgttgtagaaaaaaatattgaaaaaaacatattaattgttgctcaaggttcttataataaacaccttatgtccataggattaattgctaaaaatattaattggattaattatgatcagttgtcttttcctttgtcttgtatggcaaaaacaagatatcgtcagaaagatattatatgtaaaatagaatatattaataatcatcatataaaaatattatttgattgtccagttgccgccgtcacacctggacaatcagtagttttttatgtatcagatatttgtataggtggtgggattattgaatctagattaccattgttataattttaattattttgaatagtaaggagataattgtgatgaaaaaaatacacttaattacgttatcacttgcaggtatatgtcagtcagctcatttagtacagcaattagcttattcaggaaaatgcgacagtaatgcattcagtatatgtttaaaaagtattttagaaattaatccaacttctttcattgcaatatatggtaatcatgaaaaaaacctcatcataggattggaaatattgttatctactttaactttttctagtttttcttattcatatattgaactaattaaatacatttctaatatgatgattattgaaaaaaagttaaaaaaaagtcgtacggcaatttattctttaaaaaataaaatatcagttatatctagtgaatactatttaaattacaacataaaaaatttaactcgcaaactaggagaactatatcttgaaattattagttctttaggttcgcgtattgtaataaaaggaataaaagattttttacaagatcatcaaatacaagaaaaaattcgatgtttgttattttcaggtattcgtgcaatagttttgtggaagcaatatggaggaaaccaactgcaattgatatattttagatattttattattaaaaaagcaaaaaaaatattgtatcatttaaaagatgcaacttaattcttataaaaaattgttaaaaaattaggatataaggcatggaattaacctctttaacagccatctctcctgttgatggtcgatacagcaatttaacaatattattaagaaatatttttagtgaatttggttttttaaaatatcgtttgaacattgaagttcagtggctaaaaaaaatcattagtatgtctcaaatattagatattaataatattgaatataaagaaatattatttcttgatagtattgttgaagaatttaatgaaaaagatgcaattcttattaagaatatagaaaaagaaaccaatcatgacattaaggctttagagtattttttaaaaaacaagatcgctcaatctaaaaatcttttaactatttcagagttcgtacattttggatgtacttcggaagacattaacaatatagcatactcattaatgattaaagatgctcgtgataaaataattttaccattatggtataaaattataagtactttaaaaaaaatggtttttaaatatcaacactatcctttattatctttaactcatggacaacccgctactccatcaactatgggaaaagagattgctaatttttattaccgaatgaaacggcagtatatcatactcaaaaaaatagaaatattaggaaaaattaatggaagtactggtaattataatgcacatttagcagcatatcctgatattaactggcataagataagtaaagatttcatcacgtcatttggtattaattggaacccatatactactcagatcgaacctcatgattatattgcagaattttttagttgcatgtctctatttaatacaatattaattaattttaatcgcgacatgtggggttatatttcacttaattattttaaacaaagaacaatagattatgaaataggttcttcaataatgccccacaaagtcaatcctattgattttgaaaattctgaaggtaatttaggactttctaatgctcttatgaatcatatgattacaaaattacctatttctagatggcagcgtgatttaagtgattctacggtattaagaaatataggtgtggctatttcttatgcaataattgcatataattctgtattatcaggaattaataaattagaaattaatgaatctgaattattaaaaaatttggataaaaattggtctattttatcggaacctattcagactattatgcgtcgttatggaattaaaaacgcatatgaaaaattaaaaaaattgactcgaggaaaagaaataaatagaaatgtcatacatacatttatttctagtttaaatattcctgaagaagaaaaaaaacgtttaaaaaatatgactcctttcaactatattggagcagcgagtcaaattatcaatgaaatagaataaaaaaaacaataattttaaaacttttgtttcaatcttctatttataataaaaattacaagaaatttttaaaaaatttaaaatatcaaggagaatatgctgtgacattaggaatattagctatttccattctgttattaactggatttaatcagtttttaaatacaaaaccaactttaaaaaaaaattattttttaaatcaaaaaagtataaaaaatactttaaagaattggaatgatatcattgcaactacagctaataaatataaagttgatgagaaattaattaagtccattgtttacgtagaatcttctggtaatccttatgctaaaagtcaatctaatgctatcggattaatgcaaatcaaaccttcctcagccggagcagaagtatatcgtttaaatggaaaaaaaggcagaccttctattcaagaattatatgatccaaaaacgaatatagatataggaacttcttatatcagttttttacaaaaaaaattcatcagtataaaaaacaaagatgtcatgagatatgctataattgtcgcatatgtcaatggaactagtgcacttcttaaaacattttctaaaagtagaaaagaagcaataaacataataaatactatgacaaaaaaatctttttgtacacacataaaaaaaaacacccggcagtgcaagcatttcgttatttaatgaaaataattacggtttataatctaatataaaaatattatttttaaacaattaataattttttaaaaaattaaagattattcttaataatatctatatcttgagatataaaaatgggatttttaaaaggtaaaaaatttttaataattggcatttcaagtgtacgatcaattgcttttggtatagcaaaatctttatataatcagaaagctgaattaggatttgtatgccaaaatgaaaaaatcagaaaaaaaataaaaaaactagtagaaccaatgaaatcttgtatcgtactatgttgtgacgtttctaatgataaaaatattaaaaaattatttatagatttaggtcaggtatggaagaaatttgacggattagttcatgcaattgcttattgtccaaagcaatattttaatggagattttattgataatattaccagagaaggttttaatatttctcatgaaattagttcttatagttttataggattggttaaagcctgcagaacaatgttaaacaatttttcttctttattgactttatcttatttaggttcacaacgtgtcgtacctaattataatgttatgggtttagctaaagcttcattagaagcaagtgtccgttatatggctagttcattaggaaaagaaaatattcgtgtcaacgctatttcgtctagtcccattaagactatttcctcttataaaattacaaattttaataaaatacgaaattgttcttatgcatcttcttttttaaaaaattctgttaccagtgaaaatataggaaatgtagcatcctttttattgtctgatttgtctttaggtattactggttcagttatttatgttgacaatggttttaatgtcagcagcatgaataatattcaataatattattattcaaaatttagaaggattatttatacataaaaataatttacatacaatatacatgctaattttaaaaactaaaaagtaattatctatgttatttcataaatgaattatacatttaaattaattttttacatttatgagattcttaattttttacaatgacaattgggtcgtattattatgtttcaaaataatccattacttacacagttaaaaaaaaacctacatgctaaatcaccacgtgttgaaggcatagtaaaaagcactgaaagaggatttggatttttagaagttgatccgcaaaaaagttattttatacctccaaaaaatatgaaaaatgttatgcatggagataaaataattgcattattaacaacagaaaaagatcgagaaatagttgaacctgaaaaattaattgaaccttttctaaatagatttgttggaaaaatagagaaaaaagacaatcgcttatttattgttccagattatccgtttttaaaagatcttataacatgtcaacctaacaaaaattgtatcaatatttttcaaaacggagattgggctgtagctcaattaaaaaaacataaactcaaaggagatcatcttttttatgctgagttaactgaaaaaattactcaagaagatgatccattaataccatggtgggtaactctagcacgtcacgatcttgacaggaaagaacctttagcagaagacgatgatcttatattaaaagaaagcgataatagaaaagatttaacagatttagattttattactatcgataatacaaatacaaaagatattgatgatgctctttttgtaagtgaaaaaaataatggagatatttctttaattgtcgctattgcagatccaaccgcttatattaaacatggtagtaaattagatgttatagcatctaaaagaatatttacaaattatttaccaggttttaacattcctatgttaccccgtaatttatcagaagatatatgttcattaaatcctaacaaacgtcgccctgtattggcatgtcatattacggttttaaaaaatggaaatatctctaataaaattgagttttttttagcctggattaaatcaaaatcaaaattatcttacgatcatgtttcagattggattgaaaaaatagggtcatggataccaccaacaaaatctattgcaaatcaaatattaattttacatcgtctatgtttattacgtataaaatggcgcaaaaaaaatgcagtgttatttaaggatagcatagaatatcgcttccatgtatcagaacatggaaaaatcatagatgtgttaattgaaaaaaggcgtattgctcataaaattattgaagaatctatgatagtagcaaatatatctgctgctaattttttatctaaaaatattggttttggtatatataatgttcattctggttttgatcttgttaatgctgaaaatgcagtatcctttttgagaagttacaatttaaactttactgtgaaagaaataactacattgaaaggtttttgtaatctaagacgtgtattgaatattatatctaataattacatcgatagtcgtatccgtcgttttcaatcttttggagatttcagtactataccaggaccacattttgcacttggtttttcagaatatgcaacctggacttctcctattcgtaaatatagtgatatgattaatcatcgtttattaaaatctattataaaaaaagaaaagtcaattaaacctggtgaagatattaaaataaaaataagtgaacaaagacgacgtaatagaatggctgaaagagatgttttagattggctttatactatatttttacagaaaaaaaaatatcaaaaccaaaaatttaacgcggaaataactgatatttctaggagtggaataagagccagattaatagaaaatggtgctaatgtttttattcctggaactctaatacatcctattagagaagaattaaattttaatcaagaatcaggaaaagtttttattaatggtattatgcattataaaatatctgatttgattcaagtcactttatcagatattcgtttgaaaactcgtagtattattgccaaacctgtatttgaaaaatttaaataagaaataaatatgctattttattcagtataaaaatcagaagactacctgaaacataataaaaattttttcaataagttatgaaaattaaatataaattaggagtataatatgaatatttcaatttttgatttatctatatatataaaattttttataggtttatgtgctttagttaatccaattggaatgattcctatctttacaactatgacaaataatcaatcttttttagaaagaaagaagactaatatagtagctaatttttcagtatcattaattttattaatatcattattttttggtagtaatattttaaatatttttggtatatctattaattcttttcgtattgctggtggaattctaattattagcatagctttttctatgattagcggtcaattcattaaaacaataaaaactaaaaaagaaacaaaagaagaaaataaaatagataatattagtgttgttcccttggcaatgcctttaattgctggtccaggggcaattagttctactattgtttggagtacttattattcaagttgggctaatttatttttatgtagtttagtaattttcttattttcttttgtttgttggttatgttttgaagctgctccatatgttgtgcaaattctaggaaacacaggaattaatatcattactcgtattatgggtttattattaatgtctcttggaatagagtttattagtactggtataggtgctattttcccaggattattacattgatctatttttttatatttaaatttttaccggatgattcttgaaaaaaaaaattatttttttgcgtaatttaggaatagaacattggttaacaacatttaataaaatgaataattttattatatcacgcaatccttgtacttacgatgaaatttggtttgtagaacattatcctatttttactcaagggcaatcgaatgaacaaaaaaatttaattgtttctaatgatattccagtagtacaaactaacagaggcggtcaaattacatatcacggacccggacaacagatattatattttttaattgatctaaaacgtagaaaaatgaatattcgtcaattaataaatataatggaacaaacagtaattgaaactttaaacaatttttctattcaagcatacactaaaaaaaaaatgccaggtgtatatattaatgaaaaaaaaatatgttctttaggattgcgcataaaaaaagggtttactcttcatggtttagcattaaatgttaatatgaatttaacaccatttaactacattcatccttgcggagataaaaatatgaagatgacacaaataaaagattttaattcaaatgttaaattaaaagatgtaaggtttattttaattaaagagttatctaaatttttagaaatttttataatcaacagtaattaaaataaaaaattcactaaataaattttgtttttttatcttaaatttctccgtataagaattattttaaagttaattttcaacatatattttcatctttgtaattgagataataaattgtatgaaaaaaaataaagatgttttattaaaaaataaaatattaaaaaaattaaatattatcaatattaaaaatcttgataacattaaagaaaaattaaaaaaacctgattggataaaaattaaaatacccgttaatacgtctcgtatatatcaaataaaaaatgctttacgtaaaaataatctatattctgtttgtgaagaagctcattgtccaaatttatctgaatgttttaataatggtactgcaacattcatgattctaggatctatatgcacacgaaactgtcctttttgcgctgtttttcacggaagacctaatcctgtaaatgtagaagaacctcaaaaattatctgatactatttttgatatggggattaattatgtagtaattacctcagtagtacgtgatgacttatatgatgggggagctgaacatttcgttaattgtatcaaggctattaaaaataaaaatcaagtaaaaattgaaatattagttccagactttcgaggaagaatagaattaattttaaatatttttaataaggcattgcctgatatttttaatcataatatagaaaatgttcctagactgtttaaaaaaattcgtccaggagcaaattatcaaagatcattattattattagagtcgtttaaaaaaaaatattgcagtgtattaactaaatcaggtttaatgttgggtctgggtgaaaaagatgtagaaattattcaagtaatgaaagatctttattcaagtggtgtaacgttattaacggtaggtcaatatcttcaacctagtattcatcatttaccagtaaaacggtatatacctctttcagaatttgaaaatataaaaaaagaagctttatcgattgggtttactaatgctttttgtggtccttttattcgttcatcatatcatgctagttttcaatcgcatttacctattaaaaataatgatattaataatatttaacagttaacttttatatgtaatgtaattagaatattttacatcgaaaaatatatagaaaataatatttttttaattatatatattttttatactagaggtctatagtgttgaatcctaatatttttcacatgccgaaaataatcattgcgttagatttctgtaataaaaagtccgctatgaaattagtaaatcttcttaatccatcaattttttatttaaaaattggaaaagaaatgtttacaattctaggttgcaaatttgtcaaagaattacaccaactaggatttaatatatttcttgatttaaaatttcatgatattccgaatactgtatttaacgctacaaaggcggcagctgatttagggatatggatgttaagtgttcatgcttctggtggtaaagaaatgctaatctcggcaaaaaaagcattaaaatcttttaaaaaagctcctttattgatagccgttacagcattaactagttttaaagaagaagcattaaaagaaattggaattaatatttcattaactgaatatattttaaaattatcaaaattatctaatgattgtggattagatggtattgtatgtccaggtaaagaagcaaagaaaatcaagtttttatttggaaataaatataaaattattacgccaggtattagaattgctaaagatttactatatgatcaaaataacattattactcctaaagaagcaaaagaatataaaatagattacatagtaataggacgttctattactatgtcaaaaaatccaattaaaaaattagatttaataataaaatcgatgcaataaataacaattttaaaaaatatttatttaattgtaaattaggagaatttatgcaattaatagaaaaagccatgttacctactccttggggaaattttcttatctttggttttgaagaaaagaaaaatgggaaaaatcatgttgctcttgtatatggtgatataaaaacaaacactcctactctttctagagtacattcagaatgtctaacaggagatgctttttttagtttacgttgtgattgcggtagtcaactagaaatgtctatgaaaagaatttctcaggaaggcagtggtgtattaatttatcatcgtcaggaagggaggaatattggtcttcttaacaaaataaaagcatacgctttacaagatagaggcttagacacggttcaagcaaatcaaaaacttggtttttctgcagatgagagagatttttcattatgcgctgatatatttaatatattaaatattaaaaaaattcgtttattaacaaataatccatttaaagtgcagatgctgagtgatgccggaataaatattgtagaacgtgttcctcttattgtaaaaaaaaatcctaaaaatgcttattatttaaaaactaaagctgaaaaaatgggtcacttgttgtctgaataagtacgattaattatttaataatataaatttaattttgaatttgtaaaaataaattttactgtttaaggagtaggggtttttttgatgaacccccggattaaaattataacaaaaaatcttctaatatttttttacgctctaaaatagcatttttaataactgatggagtgcgaccttgaccagtccatgttttaaaatctccgtttttattaatatatttatattttgctggtcttttaggtcttttgcgtttttctgatgatttaatagaattagtttttgttagtaattcgttagggttaataccatcagcaatcaacatttctctatatttttttaattttattgccctctgtgctatttcttcttttattttcttttcttctttttttctttcattaataacaactttaaatttttctaatatttcctctagaatttctaaagaacattctcgtgaatgtacacgaagtgtacgaatattatttagaatttttagtatttcattcatcatcatgttctcattatatccgttcaaggtaaaaatttttttacttaaaaattaatatcaaaaatgagaaattaataattttaatatatttaaaagaactgatttattaaaactataaaaatttttcttataaaatattatataaaaaatttttacactttggcacttaaaatatataaaaattaaacaaaatactacgtttttatataaatatataacatggttttgttgtacgtacaatataatgatttcataaaatataaatatatatatttattatagtgaaatattctattgataaaataaaatttattattgattaaaattttttaaaaattgttattattacaataatggacttaaaaagtaaaatattttttcaagaattcttttccaatatgcgcgcatagaccaagcttttttatctattaactgggaatcagaaatatatttattttgtatacaaaacaaattacgtccaaaatcactatcatcaataaccaaagttatttcgaaatttaaccaaagacttctcatatctagattaacagtcccaattaaacttagttgttgatctactaatatacttttactatgtaataatcctttttgaaattgaaaaatttttacacctgcttctaataactcactaaaaaaaactctactggcccattttactaaaatagaatcattatataaaggtataatgatgctaacttctactcctctttgagctgcagtacaaatagcttctaataaatcttcactaggaactaaataaggggtagttatgattaattcacgtttagctgaataaatagctgtcaataacgcttgatgaatcatatttttaagaaaacccggtccggatgcaattacttgaatactagcgtttttattagattgattttctaacatttttttatttggtaattgaggcaagatttttaaacctgtttcaatttcccaatcacaagagtaaattatacccattgttgtagcaataggcccttctattcttgtcattagatcaatccattgtccaatttcagaagattttttaaataaataaggatctacaagattcatgctaccagaatatgcaatataattatcaattaatataatttttctgtgttgtctaacatcaacacgtcttaaaaaaactcgtaataaattcacttttaaagcttctactacttgaattccagattttctcataatttcaacccaggggctctgaaaaaattcaatacttcctgctgaatcaagcattaatctacaatgtattccacgttttgcagaatcaatcagagctattgccacatcatctgccatcccacctggtttccaaatataaaaaaccatttcaatatttttacgtgctaaataaatatcacgtattaatatttgcataattttcttggtattagttaataatttaattttcttgcttttaattccgtgtagaccttgtctatttttacataactgaaatatagaagtagctacttcactattttttatttgaaaaatatatgtacaagactttaattcatgaagccatttattagaaatggaccatattctatttgcaatttttttttgtcttttccctaaataaagctcaccaaaaaaaaaccaaatagaaataccaataaaaggaataatataaattgttagtaaccaagacatggaataaggtatattgcggcgtttaattaagactcgaaaggtaatattagcaattagtaaccaatatgttgaaaaaattaaacatttgattaaattatagaaaatatccatccattgaaggtcctatttatgattttgtcaaaagatcttctatttaattaaatattttttatttttttagaaaagtatatataatatttaaagtagtagaataatgtatatatattaaaacttattcatgaatataaaaaatgaatctgattctaaaaattaataaaaaaattatttttttgttcaacactttttaaaaaacagcgatttagcaataaataaaaatataattagttttatccagtgttgaacgtaatattttgaaaatattttttataagaaaacaataattttttataagtatatattttttaaaattttttaagtgaatgtaaaagaattaaaaataatgacttctattttacaataaatcatattatttaaataatactcataggtaataactcacggggttgtcccgtcttattaatagctacataaataaatattgcttctgcagcacagtagtattgacctaatggtttagaataaatttttttaatccatatttctacattaattttaatagaactttttccaattttaatgcaatttgcataacaattaacaatatcaccaactgacacagattttagaaaattaatactatcaacacgtacagtagctaccttgccaccagaaatttctttagccaatattgcgccgcctagatccatttgagacataatccaaccaccaaaaatatcaccattagcattaatattttcaggcattgaaagtgtttttaacactattattccctttggtaatttatttttttctgacattattaaaatgttcactctattattaggttataaaaattatttattttttgatattttacaattgatatagatacttgttattaaaattaaaaaaaatgttaaagatgtaaaaccaaaaactttaaaatttacccatatagtttctgaaaaataatatgctatataaatgtttaaaatagcgcaaaataaaaaaaataaagaccagataaaattaattttgcgccaataaatattagatatttttatatctttttctaaaaatctttgtatcattggttttcttgtaaaaaattgactaattaataatactaaagaaaaaattatataaataattgttattttccatttaataaattgactgttatgaaaaaagattgttagagaaccaaaaaaaaagactgaaagaaaactaaataaactaattttatctatttcattataaaaaatccaatggattatacatattaatcccgatataacaattagcgaaccagaagctataaaaatatcataaaatttataaaatatgaaaaatatgaacattggtaatatatttaatatttgtttcataatataaacctgaataattttcaatttttaagaacgcaagaaaatcatataaaatcgaaataagtatataattaaaatcgaaaatagtatattcatactaatatttgatattaaaaatagaacgtttttgttaatcaaagaaaaatgagctagcaacatagttaaaataaacttaccacacatccaaaataatacacctggtcctattatttttatatatttccaagaaatatacatactaagacgaatagaatctagtaatctattctttttaaaaaataaaataataggagataaagatagtattatagataataatattcctgggataattaacaacataaaacctatctgaataataaaagtagttaaaaaatttaatataaataaacttggaaaaaataaaaaaaaagttcttattgatgatacaattgatttttttttaggttcagatacaacagaaattaaaatgataatacttcctaataatgtggttttactaattaatgattccataatttttaaaatagaatattttaataattcatgtttttcatttaaattcatattttgaatgaattctaataatgagctagtgttgataaatttattattttccattatagacacaatatgcatatctggtttaataaacatatctattaatatattcataaaagtagcaaatatagatataaaaaaaatagctcctatttttttgtaaaaaaaatgatgcgtatcatgacgtaatttatttactgtaatcggcatatgtatattccttataaataactttatatgatgcaaagattatacatattatttgatatgagaatgtttttaaaacataaaagattacatattatataaaaatattattctaatttagtagaaagttttaataaatgagtaaatttttttatttctttaatcatttttttttcttgatttaaatatttttcaataatatttattattgctgaaccacatattacaccagataagcctgatgatattgcttcttttatttgtttaggatttgaaataccaaaaccttgtaatagagggacagaattatatttttttattttatttataaaatctctaggtaatgcaatagtattatttttaatcccggttactccaggacgagataatacataaataaatccttgtgcatataaagaaattttatataaaaagtctgcgtctgcatcaggaggacagataaaaataggattaattttatatttatttgctatattataaaaaatttttgattcttcaattggaacatctgctataagtacagaatctaaaccagaattaaagcattgaaaataaaaattatcaataccttgattatatacaagatttgcatatatcaaaataccaataggtaattttttattttttttacgtaattgttttaatattttaaaatattcaaaaaaagtattatttttagataaagcacgtaaattagatttttgcacagttggtccatcagctaatggatctgaaaacggaataccgatttctaaagcatccgcaccactttttattaaagtttcaataatttttattgatgtttctaaagaaggatcacctaaaactacaaaagggataaaacatccttctttcaagcaagataatcttttaaatgtttcctgatatcgattcatgattactctccttcttttttaaaacatcatgtactgtaaaaatatctttatctccacgacagaaagattagcaattaaaatttgttctattgtaggatcttttttcattaattttaatgcatatgctaatgcatgagaagattctaaagcaggaataatgccttcttttcgagataaaacctgaaatgcacttattgcttcctcatcagtaatagagacatatttcgcacggttaatactattcaaccaagcatgttcaggaccaacagatggaaaatctaatcctgctgaaattgaccaagattcttgaatctgaccctgtttattttgcatcaaatgtgatttcataccaaaataaataccggttctaccatgttttaatggtgccccatgttttcctgtgtgtatcccataaccagccggttctactccgattaaattaactttatcattaataaaatctgaaaatataccaatagcattagatccaccgccaatacatgcaataattgaatcaggaagtttgttttctttttctaaaatttgtttttttgtttcttccccaatcatcttttgaaattcacgaacaatagtgggatagggatgtggtccagctgcagtaccaatcatataatgagattttttataactactagaccaatcgcgtaaagcttcattacatgcgtcttttagtgttccagaaccgtttttaactgagatgacttctgcacccattaatttcatacgaaacacatttgtgttttgtcttttaatatctttaattcccatgtaaattctacattttaaattaaatagtgcacaagcaattgcagaagctacaccatgttgtccagcacctgtttcagcaataatttctttctttttcattctaattgctaacatagcttgacctaatacttgattagttttatgtgctccaccatgtagtaaatcttctcttttaagataaatttttgtttttgttcctttggttaaatttttacatagagttaatggagtaggtctgccagcatagttttgtaataaataaaaaaattttttttgaaattcagcatctttttgcgcggaaacaaaatttttttccaattcaaataaagctggcattaatatttgtggaacgtacataccgccaaactcaccaaaataaggatttagtaaagtcatataattattttccttgattgattaattaaaaaattatttaaccatatcttaatttttgaaaaattgattttattttcttgtagtctttaataccaggagatatttctacgccggaatttaaatctaatcctgagcattttagtttagaagctgtaatacaattctttaaattaattcctccagctaaaataacattatctaaaatatgatggtttaaaatagaccaattaaaagatgtattacttcctccagaatcagagtcaaatatatacatatttacattgtcccaattgcgatctggcaattctgattgaatagaaaaagctttccaaatattgatttttttaggtagtatattccttaatttatcaatatattgtttattttcttgtccatgcagttgtacaccataaagtgatagttcttcagcaatatctacgataatattgatattttcattttgaaaaattccgatcaattttaattttctatttatagaaatattttttgcagtttttttagtaatataacgaggagaattttttacaaaaataagtccgccgtaaattgctccgtatttttcagaaacttctatatctatactacgagttaatccgcagactttattatcaccaaaaattatagaacgaacggctgtctctaaattagtttgagacatcaaatgagaaccaattaaaaaaccattgacaaatttactaagttcttttatttctctatatttttttatacctgattcgcttattattatagtatcttttttaattaaagaagataaagtacgtgtacgatttaaatcaattgataaatcatgcaaattgcgattgttaatacctataatattagcatttaattttagagcacgttttaattcctctatattatttacttcagttagtatgcccatatttaatttttttgcaattatagatagttctttatactgtatatcatttaaaacagataacattaataaaatagcatctgcattataatatctagataaatatacttgatatggatcaataaaaaaatctttgcataaaacaggttgagaaacacattctcttactatatttataaaatttaaatttccatgaaaatatttttcatctgtcaggactgaaacagaagatgcatattttttgtaaacattagaaatttcaattaaattaaaattgtttctaataatacctaaagaaggagatttctttttatattctaatataaaacatggttttttttcttttaaagaatggtaaaaatcccgtgtttttttatttattttatctttaaaatcaattaaaggctgtttttcttttcttaatctaatccattcacttttatcttgtataatttttttaagtgttgtgtcttgcatgattatcttcttttaacatgttggcaacatttcgtatatgtttataaacatctccgcttctaattttatttaatgctaatttagtattttcttttaaattttcgtatccgaatacttttaataacatagctacatttactgctattaattcttcgtataatttactgccttttcctttcattatttctttaataatatgataattttcttctaaagaattaatttttaaaatttttttaggatgcatttttaagccaaaactttccggctgaagttgatatgatataatttttttatttaataactcagaaacatatgttgttccatataaagtaacttcatctgtgttatcactatgtaaaacaattgctcttttatattgtaaattttttaaaatattaactgcaatatttattagatttttattatatacaccaatgacagaaagaggaggtgttgcaggatttagaaaaggacctaaaaaattaaaaatagttttagtctttaaatctgtacgaacattattagaatatttaaaaccgtcatgatatttaggtgcaaataaaaaacaaatgtttaattgatctaaagttttacgagatttttctggagatgcatttagatttatattgaatttttctaaaatatcagaagagcctgatttactagaaattctttgattgcaatgtttaataatttttaaaccacatgttgctgctacaaatgcactcatggttgaaatattgatagtgtttttagcatctcctcctgttcctacgatatcagaaaaaatataatcaggttttggaaaatatttcattttgtctaaaaatgcttttattgctcctgttatttcttcgattgattcacctcgtattttcattgctgttaatatagatgctagttttatatctgttatttttccagaagaaattaatgtaaacaattgataactttcttcttgatttaaaaattttgaatcataaattttaagtaaaatatttcgcatttattaccttttagtaaattttttaaacaagtttttatttatatttaaaatatttaaaaatttatattttgttaaatttccacaataatctattgatgtgaataattcaatttaaattttaaaaactttattttataaagtttttaaaatcaaaatttatactaaaaaacaaaaatataactattatttatagacactatatgtgttatatttttattttttggggccttttaaatgaataaaatattagtgataatattattttctttagtttctcttacttgggggaccacatggattgcaatgaaaattgcaacagaaacaattcctcctttttttgctactggaatgcgttttttagttgcatctcctatattaattattttagcgtattttacaaaaaccccactcttatttccatacggacagagatggtttcaattaatcatttcaattttttatttttctattccatttgcattaatgttatatggaggtatgtatgttagctcttctgtagcttctattatattttccagtatgcctgtagctgtattaacagtatcatttttatacttgaaaaaaaaattatttctaactcaaaaaataggcatgtttatttctttaataacattgttaactattttgctaatagaattagaatcacaatgtttttttcagtggaagggaattttagctttactgtttgctttatttagccatgcttttatttactctgaatgtcaaaaaaaatgtttaaacgtatctgttataacttttaatgctttaccatcattattatctggaatattgttatctactacatcttggtttatagaaagtcctcatattaatactttttctaatagatctattttagcgatattttatcttggagatttttctggtatttttggtattttatcttatttttatttacaacaaaaagttagtgcattttacgcttctactgtttttttaatttttccagtgattgctggatttttagaaaattatatttataaaaatgctattttattatgtgaaatatggtttattttcccattaattattggaatattattaactttaatccccgttaattatctaaaaaagataagaaataaaataacgagactatcatgtttgctattttagtataacaccactataaagggtttaataaatgagcgaaaagatacaaaaaatattatctcatttgggatacggttcacgtcgcaatattgaaaacatgattaagtttggagacatatctattaatggaaaaaaaatagtaattggacaacgtttaaataacaaaaatattgaagtaattactattaagggagaaacagtatctataaaaaaaacagattttaaaacaaaaataataatttacaacaaaccagaaggggaaatatgtaccagaaatgattataaaaaacgacctattgtatttgataaattaccattgttgaatattcatagatggataagtattggaagattagacatcaatacgagaggattgttgttatttacaaataatggaaatctagctaacgaacttatgcatccaagcaataaaatagaaagagaatactatattagggtttttggaaaaattaataaaaatacaatgaatattttaaaaaatggagttaaaattaaagatggtaatgctgcatttaaaagtatacagactattgatcatgcatgttcaaaaaaaaataaatggtttaaaggtgttttatgtgaaggaagaaatcgtgaaattagatctatgtggcaagcagttcaatgtcaagttagcaggttaattagaatacgatatggcaatatttttttaccaaaaaatttaaaattaggagattggagcgaattaagttctgaatcagtaaataatttatctaatctagtttctttaaaagattcttgaaatcattttatataaaaaattatttttttattttaaaaaacatttgttctattttttttaaaaaggtttattgtgtgaatttacttttaaattatgaattattcttagcaaaaattattacttttattataattagtatttccatattaattttgttttatactataataaaaagaaaaaaaaatattcaaagtaaaatcaagattactttattacaagataattataaaaatgtaaaaaataaaattttattatctacaatgaaaaatgttgaaaaaaaaatatggtttaaaaaacaaaaagaaaaaaataaaaaggaactattacttaaaaataacaagaaaaaattgtttgtattagattttaaaggcgatgtttatgcaaacgaagttgttggattgagagaagaaatatctgctattcttttagtagcaaacaaacatgatgaagtattattgagactagaaagctcgggaggtgtaattcatggatacggcctagcagcatctcagttaaatagattacgtcaaaaaggaatacgtttaattgtttctgtagataaaattgcagcaagtggaggatatatgatggcatgtgttgcagattatattgtttcagcgccatttgcgataataggttcgattggagtagtcggtcaaatacctaatttcaataagttattaaaaaaatgtaatatagattttgaacttcatacagctggagattataaacgtactttaacaatgtttggaaacaatactgaatctacacgtaagaaattctgtgatgagttaaatacaacacataaactttttaagagttttattaaagaaatgaggccatctctagatattgaagacgtttctaatggagaacactggtttggaactattgctttagaaaaaaaattagtagaccaaattgggacaagtgatgatatcttaatatctaaaatggaagaatacactttgttaagaattcaatatatttatagaaaaaaaatattagaacgttttactgcttcagtaacacataatctcagtgaaacgttactaaaaatatttttttataaaaattatttatagttttcaaaataaatacaatttaaatattcttatgcgatatcaatatttttttcaatctaaattaatgtaatttactggatagaaaaatgcaaaaatctctggtaatagtcgaatctccagcaaaagcaaaaactataaatcaatatttaggttctgaatacatagttaaatctagcatcggacacatccgagatttaacgaaaggaaaactatataacaaagaaaaaaacaaaaaatttttaaatgaaaatttcattgaaaagactaatgagaataaaattttaattaaacaaatgggaattgatccttatcaaaattggaaatttgaatatcatattttacctggcaaagaaaaaataatttctgaattgaaatatatcgcaaatcaagttaaacatatatatcttgctacagatttagatagagaaggagaagctatagcttggcatttaaaggaagttattgggggagattcttctaaatttagtcgtgtagtatttaatgaaatcacacaacattccatacaaaaagcttttaaaaatgtaggtcatataaatatgaatcgagtgcatgcgcaacaagcacgtcggtttatggatagaattgtaggttatatgatttcacctttattgtggaaaaaaattgcaagaggcttatctgcaggacgagttcaatctgtagccgttcgtataatagcagatcgtgaaagtattataaaaaactttgttcctgaagaatattggaaattagatgtgtctcttatttctcaagataaaaaaaagattaatatggatgtcacacactataataataaaaaatttcgtccgataaatgagaatgaagtatcttttgcagttgaaaaaattcaaaaatcatcttgcattgtgaaaaattacgaagaaaaaatatcttatctaaaagcacctgctccatttataacatctactttgcagcaatctgccagtcttcgtttaggatttagcgtaaaaaaaacaatgtttttagcgcaaaaattatatgaagaaggctatataacttatatgagaactgattccaattatttaagtgaatatgctattaaaaaagtacgaaaatatataaaaagtaattatggctctaattacttacctaaagaaccaaatatatattccaatgaaaaacattctcaagaggctcatgaggctattcggccttctgatatcaaaataaaaaatatagattcagatcatttgaactctagtgctaaaaaattatatgaattaatttggaatcaatttttagcttctcaaatgaaatcagttaaatacaaatctataaccgtaacagttttagctgatatgtttaaattacaaaaaagtgaacgaattgtaatgtttcagggttggaataaagttttaattgaagaaaaaaatgttttttctcaatttccaatacttcaaacaggaagtcagttatttattaataaagttacacctagtcaaaagttcactaaacctccaccacgttttagcgaagcgtctttagttcgcgaattagaaaaaaagggtattggaagaccttctacctattctgctattacatcaaaaatacaagatcgaggatatgttaaaattaaaaaaaacaaattttacgcagaaaaaatgggagaaattcttactattcgattaaaaaaaagtttcagcaatttaattgattataattttaccgcacatatggaaaaaaaacttgatcaagttgcggaaaataaagttacatggagatatttgcttgatgatttttttaaaaagttttctgagcaactagaacaggctaaaaaaagcccagaagaaggaggaatggaattaaataatattgttccaacttcacttaattgtccaatatgttgcaaaaaaatgggtataaaaactgcaataactggtgtttttcttagttgtttgggatataacaatactgacaataaaaaacgttgcaaaaaaactattaatcttattacattaaatgattttaataaagaacaagataatcaaaaaaaaatatctctacaattaattcaaaaatgtgacatatgtaatatgtatatggatagttattttattaatgaaaaactaaagttgcatatttgtgcgaataatcccagttgttctggctataaatttgaaaaaggagtttttaaaagtcctatttatttatctaaaacaattcaatgtgaaaaatgttataataatatgaaattaaaaataggtccatttggtaaattttttacatgtataaacaaaatatgtaaaaacacaagaaaaattttacctaatggcgaaatatctgatccaaaattagaaccgattccttttccagaattattatgcaaacaatctgacgcatggtttgttttacgggaaggcatttctggtattttttttgcagcaaatacttttcctaaatcacgtgaaactagatctccatttgtagaagaattagtccgttttcaacatttattaccagaaaaaatatattatttatctagtgcacctgttattgataattatggaaataaaactattgtttgttttgataaaaaaaagaaaacgcattacattgcttctaaaaaagacggaaaatttacaggttggtcagctgtatttattgatcaaaaatggtgtgtaataaataaatgatatttataataaataaaataaaatatttttaaaaatctcgttttttcttggattatattagataacattcacgtattttttcattaataagtctaataaattttgagctgctagtgatatttccagaataattattattattatgttcatactcacccataaaattattaattaaacaaccagcttctcgaacttgcaatttacttgctacaaatttattaggatctaaattaaaatcaaataaacaatctatttttccggctgcaacataagcagaatcaagtatactagaaccagtacatctaaaagaaattccagatattattaattttttatatatttcaaaataggatgaagttaaattatgaattttattggatggatttacagcaactgtactataatttaaagtattgattgcactgcatctagttcgatatccatttaattgtgaaccttgtccttttacggctgtgaataaatcattttttataggatcatatattacagaaatttctgttttatttttcacgacaacagctatagaaacacaaaaatatgggaaatatttaagaaaattagtttttccatctaattcagtaataatccaaacagtatttttttcatttttcttaacaagaatattttcatgtttttttaaaatagtatgataaggataagatttatgaataatttcactgattattttattagtcttataaattatgttatttaaaaatactttgtttttttctacatcttctttaacaaatttgcgtctttcataattttgaataataaaatttcctccttttcgcactgcacgaatagcaatatttaacatgggatgcatataaatctcctaaaattttaacgtttcttagaataatgttactatttaaaaatatttaatattcattcaattttaataatatacttttagatatgaaaacaatctcaaaattaatgaatttattatattaatatattattataatcaaattataaaaaataataatataattttattattttttcttactaaggcaattattttaaatgaacaaatattttgtattaatttattttaggtttttagatgaataatcatattgatatatttaacattccaatatctaaaattaatttgttagatttaaatcgtcaaaatttgaaatattttcttatttctttaggtgcaaaaaatttttgcacagaacaagtcatgagttggatttacaattattattgtgatgatttcaataaaatgctgaacattagtattaaaacaagaaaaaaactatatgaaaaatcttatatatttgcatcagaatttatagaagaaaaaatttcttatgatggtacaattaaatggatcactgatattaataatcaaaaaattgaaacggtatatatgccggaaaaaaaacgatctactctttgtgtttcctcccaaataggatgttcattaaaatgtcatttttgtgctactggacaagaaggttttcaacgtaatttaaaagtttctgaaattattgctcaaatttggcaagcaaataaaagattaaaagaaaaaaatataaaaaagaatattactaatatagtctttatgggtatgggtgaacctttgttaaatttaaaaaatgttgtttccgcattaacaattattttagatgagtatggttttggtttatcgaaacgtcgtgttaccttatctacttcaggaatagttcctgcattagataaattaagaaacatgatcgatgtttctttggcaatttctttacatgccccaaatgattttattagaaatattattatgccaattaatagaaaatataatatttcttctgttttaagttcagcattaaaatattttaaatattcaaatgctaatcgaggtggaataacaatagaatacgttatgctagatagaattaatgattccaatgaaaatgctcgacaattatctgttttattaagtaaaatacctagcaaaattaatttaattccctggaattctttttcaggtccatcttttttgtgtagtaatactgatcgaataaatatgtttgcaaatattctcagaaaaaaaggatttacgacaacaattagaaaaaatagaggagaagatattaatgctgcatgtggtcagttaactggtattataacaaattattttaaaaaatgatttatttgttattcttttccatgatatataagcatataaaataaaaatttatgaataataagtgtaaaattatcaatagaagaaaatctgatcgtatttatgttggaaaagtcgctattggcaataatgcgccaatatcagttcaatctatgacaaatactcgtactactaatatctctgaaactattaatcaaatcttagagttacaaaaagtaggagtagatattgttcgtatttctatacccaatttaaaagctgcagaatcattcaaagaaataaaaaaacaaacaaatgttccattgattgcagatatacattttgattacagattagctttacaagctataaaatatggtgcagattgtttaagaattaatcctgggaatattggaaataaaagaagagtatcagaaatcatttcttacgcaaaagatgaaaatattccaattcgtattggtgttaatgctggatctttagaaaaagatatattaaaaaaatataaaatacctactccagatgcattagtagaatcagctatgaggcatattgaatactttgatgctttaaattttaatcaatttaaagttagtgttaaagcgtctgatgtatttttagctattgaatcatatcgcatgttaggaaaaaaaattacacaacctttgcatattggcataactgaatccggtggtttaaggaatggaacagttaaatcatctataggtattgctttattattattagaaggcattggagatacaatacgagtttcattagcggcacatccaactgaagaagtaaaagtaggttatgacattttaaaagttttatctttaagagcaagaggtattaattttattgcttgtcctacttgttctagacaagaatttgatgtaattaatacagtaaatcaactagaaaaaaatctagaagatatctcgactcccatagatgtatcaattattggttgcgttgttaatggaataggtgaatctaaaatagcaactttaggtctagcaggaagtcataagaaaagtgcattttatgaagacggagtaagacaaaaagaaaaaataaaaaacgaagaaattatagaaaaaatggaaattaaaattcgaaaaaaaatagacaaattaaataattcaaaaaaaaataattaattgatatttaatacaagagacaatagtgaataaagaaattaaatctattagaggcatgtatgattattttccaaaagatttaaaaatatggaattatatagaaattatattcaaagaagttctgaatagttactgttatttagaaattagattacctatattagaaaaaactgaaatttttaaaagagcgattggtaacgttactgatgtagtagaaaaagaaatgtactcttttaatgatcgaaaaggtaataatttaactttacgtccagaaggcactgtgggctgtgtgagggctataatacaaaataatttactacaaaaaagtaataaattttggtatttaggtcctatgtttcgatatgaaagaccgcagaagggaagatatcgtcaattctatcagttaggtgcagaagtattcggattagatacggaagatatagatttagaaattattattttaacaaatcgtttatggaaaagaattggtattgattcatttataacattagaagtaaattcaattggttctaaaatagatcgtgtgcaatataaaaaagaattagttaattttcttaaaaaacgtgaatatttattagatgaagactgtaaaagaagactatatactaatccattacgtattttagattctaaaaatcaagatattcaaaatttattaaaagaagcaccattgctaagtgaatatattagtttttctgaaaataatcattttaaaaatttgtgtaatatgatgaaccatcatggaataaaatataaatgcaatccgcatttagtaagaggattagactattataatagtactgtttttgaatggaaaagcaataaattaggagcacaaaatactatttgtgcaggaggtcgatatgactctttagttcaagaaatgggagggagaaaaacaccagctataggatttgcaataggaatagaacgtttagttttattggtaaaatcactaaaaattttttctgaagtaatagaagaatcgaatgtatatattatttttataggagataataataaatgtcatgctataaatttatctgaagaaataagagatttatacccaaaattgaggatatttattaattttttacatcaaaatcttacaaaaaaaataaaaaacgctatcagttctctagcaagaattattattttaataggtgataatgaaatcaaaaaaggattttttttggttaaggatttaaaagaaaaaaaagaatatcatcttttaaaaaaggaattaatactaaaaattcaagaaatttttaaataaatttatttatttcataaaaataatttttatatttttgtataataacttttaggtaaaaaatgttaaataataaaatagatttttcaaaatatgatccaaaactatggtttgcaatagaacaagaaaaaaaaagacaagaaaatcatatagaattaatagcatcggaaaattatacgagtaattatgtaatggatgtacagggttcacaattgactaataaatatgcagaaggttatcctggaaaaagatattatggtggttgtgagtatgtagatataatagaagaattagcaattgaacgagcaaaaaaattatttaacgccgattatgctaatgttcaaccacattctggctctcaagctaatttttctgtttataccgcattgttaaatcctggtgatacaatattaggtatgaagttatcacatggtggtcatttgactcatggatcatctgtcaatttttcaggtaaaatgtataatgttatttcctatggagtagatgaaaatggtgaaattaattatgaagaattattaagattgacgaaaaagtataaaccaaaaatgattattggtggtttttcagcatattctggcatttgtaactggaaaaaaatgcgatttattgcagataacgcggatgcttattttgttgttgatatggctcatgttgctggtttagtagcagctggaatctatccaaatccaattaattatgctcatgttgttacgagtacaactcataaaacattagcgggacctagaggcggtcttattcttgctaaaaatggagatgatattttatataaaaaattaaacttatcagtttttcctggagcacaaggtggaccattaatgcatgtaattgcagcaaaagctattgcatttaaagaagctttagaaccaaagtttaaaacatatcaaaaacaaatagtaaaaaactctaaagttatggttgaaagatttttagaaaaaggatataaaatcatatctggacatacttttaatcatttgtttctaattgatttaaccaataaaaaaataacaggaaaagatgctgatattattttaagtaaagcaaatataactgttaataaaaatacgatacctaatgatttaaaaagtccttttattacttcaggcatacgtattggtactgccgctgttactagaagaggattcaaagaaaatgaggtctctagaatatcagattggataactagtattttaaataatgttgatgatcataataatgttcttcaaataaaaaagaaagtattagaaatgtgtttaaaatatcccgtgtacatttgatcaaaaatgttgaatatgtccatctttgttaatcattatattaataatgataaaaatcatactttctaaaactattttttaaactttttatttaggtagtttgatttttatttttttaaaattaattctatttttatttttaaaataaggaactacgcccaaaaatggagatttaatataatttaacaaagtttggatgtaatgcatattatatttgtcttttggaaaaatattattagcaatccagcctccacattttatttgatctgaaataatagctttttctgttaaaattgcatggttaatacatcccaatttgattgcaattattataataacagttaatttttcttgtttcacccaacttgaaaaagtatctttacaagatagtggtgtataccatccaccagcaccttctactaaaatccaattgcttttttttgtaatattgtttaaacctaaagacaattcttcttttttaatactccttttttgaaatttacttaagatatgaggtggagcattttcaaaaaatgcaatcggattaacttctctatcacttaatattatagagctacttttcttaagaagaatcgcgtcttgattaaaaaaaccagatgattttttttggcctccagaagagacaggtttgtatcctgctgtctgatatccagacatagtggctttttttagcaaaatactgcttactattgtttttcctacatttgtatcagttccagtaatgaaaaatttttttatcataataaaatctttttttttaaatctgacgtagtattaaagaattatattgttttaatatcgtaattaacatatttaatatatttttatattattattttaaatataaaaaagtttctttattaacaatcatattcatattaattgccctccaaatcgagtaactcaatattagttattatgtctatttgatacaataacatataactataatattgagttactcctaaaataaaaaagataatattattcttatttagaagaatttcccaatattttatttgaagaaaataaaatatttttatgattaatagattcaaaaatttctataatttttatttcttcaaggatattttttttaaataaattatattatagctgcattataatattgatcttttttaatttttgacgattttataatagttttatattcatcttcttttaataaagtttgtgttttattttcaggaattaaatctaatttcttaaataattctaaatcatgtttttcttctggattatctgaagtaagtaatttacatccataaaaaatagaatttgctccagccataaaacacattgcttgagtttgatcgttcattttatgacgtccggctgacaatctaatataagattttggcatcataatgcgagctacagcaataatacgaataaaatcaaatggttctacatctttattatctgccattggagtacctggaatttttactaacatattaataggtacactttctggttgaatagataaattagataattccattaataattcaatacgatcttgttttttttcgcctaaacctatgattcctccagaacaaactttcattcccgaactacgaactgcatgcaatgtatgaagtcgttcttgatatgtacgagtagtaataatattattgtaaaaatttttagatgtatctaaattatgattataaaaatctaaaccggcatcagctagtttttttgcttgtgtgctatttaatgtacccagagtcatacaggtttccatacccatttcttttatttttttaataatttcttctaaataaggcatatctttttcttttgggtttttccatgcagcacccatacagaatcgactagatcctgaatctttcgctttttttgcagcacttaggatttgttctatttctaataaaggttcttttttcaaacctgttttatatctagaactttgcggacaatatttacaatcttctggacacgatcctgtttttatagaaagcaaagtgcttatttgtattgtattaggatcaaagttttttctatgttcttcttgagcttgaaacataagattaaaaaatggttttttaaaaagcatttttgtttcttctaaagtccatttttttttcatattatctccaaaaaaattgtgattttatttaagttaacgtttatactgaattatttaatattttatatataaattattatgagtcaatctgatactatttttgattacaagcatatttggcatccttattcatctatgaataatcctcatccttgttatactgttatatcagctaagggagtatatttaaaattaaaaaataggaaatatatgatagatggaatgtcttcatggtgggctgcaatacatggttataatcatcctgttttaaataaagcattaaaaaaacagataagaaaaatgtctcatgtaatgtttggcggaattacacatcctccagccatttcactgtgtcgaaaattaatttcactaacgccagaaaaattagattgtgtttttctttctgattccggttcagttgctattgaagtagcaataaaaatgttaatacagtattggcaagcattagggcaaaagagaaaattatttttgactattcgtaatggttatcatggtgatactttttctgcaatgtcagtatcggacccaaaaaattcattccatcaaatatatcataacttattaccaaaacacttatttgcagacgcaccagtttcttctttttataaaaactgggacaacgaagatattttatcttttaaaaaaataatagaaaaaaattcatttaaaatagcaggggtcatattagaacctatcgtgcaaggagtcggagggatgaatttttatcatcctatgtatttgaagcaaataaaaattttatgtaatcattattctattccagttatttttgatgaaattgcaactggattcggtcgaactggaaaaatgtttgcttttgaacatgcgaatgttgtgccagatatactatgtttaggaaaatcaattacaggtggtacaataactttggccgcaactctaacttcacgtcatattgctgatacaattagtaaaggtaaagtcggttgttttatgcatggtccgacttatatgggaaatccattagcatgtgcagttgctaatgctaacatcaaaatattaaaaactaatcaatggaaaatacaagtattgaatattgaaaagcaattatttaaaagtttaatgccgttaattaatcatccttatgttactgatgtacgtgtattaggagccattggtgtagttgaatgttctcgttcaattaatatgatttcaatacaaaaattttttgttgaaaatggtgtttggattagaccatttaaaaaattaatttatattgtcccaccttatattattagccctcacacattaaaaaaattaacgaacgtaatttcgaatgctttaaataaaactgaattatttatataattttaatttcaacacaatgcatgtataagtatccatacaggtctttgaccagtactatatacatttattttttttaattcaccagtgctattagaaatgctatatataatgaatgtattagatttttctccagcaacgatcaaatgtgtattatgagaatttatattaaatgatcgaggttgttcttctgtatcataacttttaaaaaaaacaagtttattgtcattttgattgatatgaaataatgaaataatattaaaaaagcgatcgcaagcatacaaaaaacgaccacacgatgttatatgaatgtcagaacaccaataatcttttagaaatctatttttcaatacatgtatattttgtatattttttacttttatcacgttgttctttttgtatattttccatacatctatagttccatttaattcatttatagtatagataaaatcttgattaggatgaaagatgatatgacgcggacctgattttttttgagtatgaagaatattttgttcagtgctttttaatattccaaaatcagttagataatacaagtaaatacaatcttctttcagagagataacaaacaatatattatatttataattcatttttgcagcatgacaaccttctatattatagataatctgtattggattctgaggtataccaaatttatttaatggacttacactaataaaattagaatgataagaactacaaaataaaaattctttctttttatcaaaagaaatataattggcttttcctggaatattactctcattttttttttcaaggaaaccattatggtttatagaatatgtaataattttattatcagggaaaattccagcatataataaatttcttttttgaataatatttataggttgaatttttccgtctgtttcaattttttgtattaaattcattttgccactcttgcataaattccatacttctatatttttactttctgaatttgcaatataaacaacttgtttcatacaactcctttaatattctatctataattgtcaaggattattttataaattatttctctggattatgaaaagaataaaaatatttaatcattatttttaagaagtttttttattaaataaaatttaaatattttttttaaataaatttcttaataaattaataatccacttgagacgcaaataatcattttttaaatgcaaaataaattttattcttgtagaagtttccattttccagatttttggttctttttgaaacattttcagtaaatattcagtatttatagaaccataatcattaaattctattatgcctatgttattattagatttaatatatttaataccaattttatctgctattaatcgaattttagcaattagaattaaattcttagaaaaatcaggtagtttaccaaattgatcaattagttcatattttatttcttctatttgtttttcatgtatagcgttggcgagttttttataaaaaaataatcttgtattaatgtctaatatataactactaggtagtagggaagatacatgtaaatcaatttctaatggtttttttaatgatttttcaacagaaaaaatttttccattttttagtaaatcaatagcatttttcaacaagtccatatataaagaaaaacctatattttttatatgtccgctttgttctttacctagtatctcacctactcctctaatttctaaatcttgattagatagagaaaaacctcctccaaaattatcaactgatgaaattgcttctaatctttttttggcatctgaagtgattttattaaaattgttgacaagtaataaagcatatgcttgattatttgatcgaccaatacgtccgcgaagttgatgtaattgagataatccaaaatgatcagaattttcaataataattgtattagctcttgctatatcaacaccactttcaataatcgtagtacaaatcaagacattgaatttattgttgtaaaattcattcatgactttttttaaatctatattcttcatttgtccatgacctattttaatactagcttcgggaattaatattgataatctttcagcgatgttcatgatattttgaactttattatatatataataaacttgaccgcctcttgatatttcacgtagtattgtttttcttattaatataggactatattcttgaataaaagttttaattgccaatctttgagctggaggttttgctataatagatagatcttttataccagtcatagccatatttaaagtacgaggtataggcgtagctgttaaagtcagtatatcaatattagaatatattttttttataatttctttatgactcacgccaaacctatgttcttcatcaataattaatagtccgagactacaccattctatatttttaaatagcagtttatgagtacctattattatattaattcgtccgtttttagtatgcttaaaaattaaatcttgttctttttgtgtttgaaatctagataatatattaatattaacaggccaattagaaaaacgaattttgaaatttttatagtgttgttgtgctaataaagtagttggcactaaaatagctacttgttttttattagatacagctaaaaaagaagcacgcatcgctatttcagtctttccgaaaccgacatcaccacaaattaaacgatccataggaattggtttagacatgtcttttagtacgaacttcattacttcattttgatctgatgttgttttaaaagaacagtcattacaaaacaagtcatatttttctatgttttttttaaatgcaaaacctgttttagattctctttttgcataaatatgtagtaattgtgctgcatgatcgtaaaccgttttactaattttatgtttttctttattccaatcatcaccacctaatttgtgaagaggagcattttctatagatgttccggtataaggtgagacaagatgtagatttgaaaccggtacatataatttatccccttctgcatatgaaataacaagatattcagattgtatgctagcagtttctatagttgttaatcctttataccttccaataccgtgttcaatatgcataactggatgatttaaaatcaattgagataagttaaatttattaatattgttagtattcttttttatattaccaatatatttatcatcaattaatattggcaacaaatcttttgtacaaagaaataaaatattattttttttatctataaatccatttttgatctcttctatcatgtaaaaataatcaatttctttcttaatatcaataattcttttaatatattgtgggtgtattttatgtctcattaaaaatcttaaaattttttttaaagatttttcttctgtcaaagaaaatattatttttcctgaaaatgaatataaataggacaataactgattattttttttttgattatttacattataaaatagatctagtaatttttgatatttaaaattaataatttttttgttttttaaaattttattttttgtaattttcatagaacgtatttctttaaataaagtaataattttttaatttaaattaaactaatttttattcatattatattttttataaatttaaaaatatttcttaaataaatattttaaatgtgtatttaaaaaaatataaataataattattttattttacattttattatattaaaatttatactataaatatttttatattttaataaaaatacattttatataaataaaatactgatattttttctttttatttttttaaattactataatgataattatagtatataataaaataagtaaaataaagaacaaaaaaattatcaatataaataaataaggatgtaatttctttttttttattctaattttatataaaaaaagaatttgcatcgaatcgataaaataaaaatttttattttcaattgaatatattcaaaacattcaataaaaactttataaatttaaaatgacatcagaatgtataaacctatctctctttttattgctttacgttatttatggaatactcatttaccaaattttaaaaaaataattacaattctatctattataggtattagtataacgacagcttcactaattattattacatctataataaatggatctgagaaaaattttgaaaaaaatattttatcatttattccacatttaataataactaataaaaatcaatgtattaaaaaagatcaatttcctgaaaatattttaaaattaaataatattaaaaatatttctgatttaattagtaaagaaatcattgtacaaagtaaaaacgatatttctatggcagaagtaataggaattgaccatacaaactattacaatattcataactataatattaaaagtgttttaaaaacacttaagcctggatattataatataattataggaaaacagttagctagaaaacttaatgtatttatcggtgatagactgaaactaatttttttatccaacacaaaaaattttttttcaggagaaattttcaaacaacgtacatttaaaataattaattttttttcaactaaaaaagaagttgattattatcaaattttaatgaacaaagaagacagtttgaattttttaaattattctaaagattatgttactggttggcgcgtatggttgaaaaatccactatctttaaatgttaatgagataaaaaagataacacatccattatttttattggattggacgacacaaaaaggtgaactttttaaagccatgaaaattgaaaaatatatcatgtttctttttttgtttttagttttattagtatctattttaaatatagttgttattcttactatatgtacagtagaaaaacaaaatgctgttgcgattttacagacacagggattgctgaattgtaaaattatgttaatatttattatatttggttcaagcaccgcaattattggtaatatattaggtacactaattagtctcacattaataatacaaaatgattttttgaaattttttattaacatttttattgatgaaacaaatatccctataattgttattccatatcaaattttttttattaatattactattacattatttaccatactatcaacactttatccatcttggaaggctatccaattaaaaccatctagaattttgtccaatgaataatattatcataaaatgtattaatttgaataagtcttacaaagacggcgattttacttatacaattctaaaaaatatatcatttcaattaaataaaggagatatagcaggtattattggaaaatcaggatcaggaaaaacaacttttttacatttactcgcaggattagagaatcctacttccggtgacatattatttaatggtagattatttagttctatgtcatctaataaaatgtcaaaatttagaaatattgaattaggttttatatatcaatttcatcatttaatgttagatttcaatatattagaaaatgtttcaatgcctcttctgattagtaataaaagcaaaaaagattctgaagaaatagcatataacatgctaaaaaagtttaatttagaagataagataaaaaaatatccttctgaattatctggaggagaaagacagcgtgttgctgttgctagagcatttattaataagccatctttaataatagcagatgaacctactggaaatttagatgaagacaatacaaatattatctttaatttaatcacagaattaaattctgattataatacttcgttcataattgccacacatgatcctactttaataaaaaagatacctgttttgtttaaaatagaaaacaatcagatatttaattatgaaagttaattaaaaagaaacattcaatgaattctttaccttttttaattgcaaaaaaattttctcttaagaaaaacaaaaattatttaatatttttaacctctattttatctaaaataggagtttccattagtatatttgcattaattgttagcgttagtgcattaaatggatttcaggtgttattgaataaaacaattttatcgaatctacctcatggaattatgaaatttactgatcaatcatatttcaaatggcatagtatgataaaaaaaataaatattttaccaggaattacttattctgaaccttatattgttactaaaggactattagttatcaagaaccaagtaaaaccaattgaaattaaaagctttagtaatataaaacatcttaaaaaaaaatttttttttcatctgaaaatgataattttttaaaaaaaaaaggcaacgagtgtgaaattattctttcatcttatttatcaaaatatttatcaatcaaaaaaggtaattggattaatatattttttttaaataaaaaagataatgatcttaattcgcagatacaaaatttttctttaaagattgcaggtgtatttgaatccaatggaatattagattcaaaaataggatacgttcccttgagtttttttaaaaaattttttaatgcagataaaaatattaatacaatcgaactacatatgtctgatcccttaaatgctgataaaatcattttaaatgctgcaaagaaaatcaacacaccttttttagcgtatacatggattgatagttataaatatatatacgatgatattaagaaaattaaagcagtagtatatttgggtcttttattacttgtaataatttcatgttttagtattgcatctatttctttaattactgtatttaaaaaaacacaagaaattgctattttacgaagcatgggggctaataaccgtctcattcaaataatttttttatattatggattacgctctattatcattagtaatttaattggtctttttataggaataacgactattttaaatttcaagagaatcttactctttttagaaaaaaactttaaaaataatatgttgttagataacatttattacaataatttttttatgttaaaaataaattttctagatgtaataattatatttataagtactatgataataggaatgataacaaattggtatccagcatattatgcttcaaaaattgatcctagtaaaatattaaaagaatattaataaaaacattttttaataaaacgcaaacaaaataagattccacatcttattataaaaataatttttacaatggtgaaaaatatgacgattaaagtaggtattaatggatttggtcgtattggacgtgtattatttcgactcgctcaaaaacgttcagatattgaaatcatagctattaatgatttactggctcctgaatatatagcttatatgttgaaatatgattcaacacatggtgtttttaaaaaacatattacatttgataaagataatattattattaatggaaaaaatatccgtgttacttcaataaaagatcctgaaaaattaatgtggcatgatttatcaattgatgtagtaattgaatcaacaggtctttttttaaaaagagaacaggcttataaacatatcttagctggttcaaaaaaagtagtagttacaggtccatcaaaagacgatattccaatgtttgtgaggggtgctaattttcataaatatcaaggggaaagtatcgtatctaatgcatcatgtactactaattgtctagcacctctttccaaagtaatagatgataactttggtattattgaaggtttaatgacaactgtacacgctagtacagcaactcaaaaaattgttgatggagcttctgataaagattggagaggtggtagaggggcattacagaatattatcccatcttctaccggagcagctattgctgtaggaaaagttttaccaaatttaaatggaaaattaactggtatggcatttcgagtcccagtatcaaatgtatctgtagttgatttaacagttcgttataaaaaatctgctacatattctgaaatatgtcaaaaaattcaacaggcttctcaaaaagaaatgaaaggcataatgggatacacggaagatgaggttgtttctacagattttaatggtgaagaattaacctctatttttgatgctaaagcaggtttatctttaaataaaaattttgttaaattaattgcttggtatgataatgaaacaggttattctagtaaggttcttgatttagtatctttagtatctaaaaaatagatgttcatataactaataattataaaaatatcatattttattctaaaaaataatatttatactttcattagaaataatgatgggtatattttttatatatagcagtattaatttttaatttaatactgctattatatttttaaaaatattttaataatatttaaaatttttttccataatttgaaatttattattttctatacatattttatataaaaaaataatttaatttttatatcaatgcgaaataaatatatatatatgtgaattgaaaaatttagtttaaaataaactaaaaaagtctattattctaaataatattttttatatttaatgtgtattaaaataaggaataatttgttttacccattgctttattctatattcagttttatttgcttgacgatcttcatctaaaattagtccataaaaatattttttattcagtaaagctttagattgctcaaaataatagtcttctgtagaccattttccaattatattcgctttatttttttttaaaatatcataaatggtacctattgcatcgcaaaaatattcactgtaatcttcttgatcaccgcatccgaataatgccacaattttatttgaaaaattgattttttttaaagttggcaagaaatcatcccaatcacattgaacttcaccataataccaagtagggactccaaatattaaaaaattaaaatcttcaatgtctttttgggaagtattactaatatcgtataaacaagaaacattatcacctatatatttttgaattaattttgctatcttttctgtgtttccagtatcactaccaaaaaaaattcctatttttttcattttagtctcttgtaataaaatatatttttaatatagatatatgttaatgtattaatgtgtattttttttctactacaaagtaaaaattaatttttatttttataaaaaaatgaatttatagaaagaactattctaaaaattcttctataaaataatatttcctaacaatatttttcagctgagttaatatattaaatataaatattatgcaaaaaaatttaatttggttccgtaacgatcttcgtgtatatgacaacacggctctacatcaagcatgtcaaaatgatacagataaagtaataagtttatttatttctactccgaagcaatggcataatcaatccgtttctaaaaaaaaaatatcttttatgtattatcatttaatttctttacaaaaagaactattaaaattaaatattattttatattatcatgaatctactgattttttaaattctatagaatatcttatttttttttgcaaaaaacataaagtcaataatttattttataattatgagtatgcaatcaatgaacgttatcgagattatttagtaaaaaaaaaactatctcaaaaagggtttcttgtaaaaggttttcacgataatcttttattttcaaatagacaaatcagaaaccaaaaaaatgaaacatataaagtttttactttttttaagaaaaaagtaatacaaaatttacataataatattccacaatgttttcctgttccctctaaacgtaaatctgatagagatatttttttaacttctatttctttgaaaaatgtaaatttaaactttaataaaaatttctttcctgttggagaaaaagaggctattaatcgtttaaaaaatttttgtatatataaatttaatgattattttcttaaacgagattatccctttttagatgctactagtatgctgtctccatatttatcagcaggaataatatcatctcgatattgtcttaaagtgcttttaaaaacaaaaaacagtcttccattaaatgttcttcttacgtctccttggtttgatcagatattatggcgtgaattttattaccatttattaattggatttccaaaaattagtagatctgaatcattagtaacatgggaaaaagaaattcattggataaataatataaaacattttaatgcctggaaagaaggaaatacaggttttcctataatagatgcaggaatgagacaattaaacgaactaggatggatgcataatagattaagaatgattacatctagttttttagtaaaaaatcttttgattaattggcgagaaggggaggaacattttatatctaatttaatcgatggagacttagcgctgaataatggaggatggcaatggtcagcgtcagtgggatgtgattctgtaccttatataagaatttttaatccattacatcaatcaaaaacttttgatgaatcgggtaattttataaagaagtttataccagaattaaaaaacgtgcctaatcatcatatccatcaaccacatgaatggtcaaaacaaaaaaattttaaaatagattatcctaatcctattattaattatagtgaaagcagaaaaacatctttatcgctattcaaacaagctcgattaaaacttcataaaaatggactgaaaaattcatgaacaattttcttttagaagatattatcaataaaaaattattatctaatcagtatcaagatacagttccgaatggtttgcaaatcgaaggaacagaaatagtaaagaaaattattacaggggtgactgcttgtcaggctttattagataaagcattattttataatgccgatactttaatagttcatcatggttatttttggaaaaatgaatcaaaatatatacataacatgcagagacaacgattaaaaactatattatctcataatattaacttgtacagttggcatttacctttagatgtgcatcctaaattaggaaataatgctcaaatcgctaaaaaattaaatattgatattcaaggtagtattttgccttatgttttatggggaacaacaaaaaacaaaatgacaggttttgaatttgctaataaaatagaaagaaaatttaaaaaatatcctatacatctatacgaaaatgctccattgtatattagtcgtgttgcttggtgtagtggtcgaggacaaggttttattaaaaaagcatgtgcatttggaattgatgcttttttaaccggtgaaatttcagaagaaactactcatattgctaaagaattaggtattcattttttttctttaggccatcatgctaccgaaaaagatggcgttaaatctttaggtgaatggttgcagagaaagtatgatttatgtgttgattttattgatatttataatcccgcttaattttattaaataaaaaagcgattatgataaatacagtgaagcgaatgttattattagaattaatttgatattttttatttaaaattttcatcacattttatttaataatttttaaaagaatattatggacaaaaataaaatagaatattggttaaattcctcttggttatctagagaaaaccaaaattatatagaaacaatatacaaaagttttctaacaaatgcccagtctattgacgatatgtggcataaagcgttcttagaattttctgaggaacaaaaaaatacttatgaaagaaataatacaaaaaataataaataccttcttataaaaaaaatagatcatatgattcacgcatttcgttcagaaggctatcaacaatctttaattgatccacttaaattaaaaaaacgaacaaaaattcatgatttagatctttcgttttataattttacagaagaagaaacaaggcaaactgtcgaaattaattttaaaaattgtactaattttcgaactaacattataagtttatacaagatattatataaaaaatactgtggatctattggttttgaatatatgtatgtcaataatttattagaaaaacaatggattaccaatcatatagaatctttctttaatgaaaatgtattcactatagaagaaaaaataaattttttaaaagaattaacttatgctgaaactttagaaaaatatattggaaaaaaatttcctggagctaaacgtttttctttagaaggtgcagaaacattaattcctgtattacatgaagtaataagattttcaaaaaaaaataatatttccaaaatagtgttgggcatggctcatagaggtagattaaatgtactgataaatgttttaaacaaaagtcctaaagttttatttgatgaattttctaatttaaatctatttcaaaaaataagtggcgatgttaaatatcatatgggaggtactgctgaaattcaatatgaaaaaaaaataatttttcatatggcatgtaatccatctcatttagaaataatcaatcctgttgtttcaggaatatctcgatcctatattgataatatgaaaaatatagacaatgaagttttacctattagtattcatggagatgcttctgtaattggtcaaggtgtagtacaagaaacattaaacatgtctcaaacagaaggttataaagtaggaggcacagttcatattattattaacaatcaaattggctttactacttctaatcccaaacatcttcgttctagtgaatattgcactgatgtggctaaaataattcaagctcctgtatttcatgttaatgcggatgatttagaagcatctatttttgctattcaattagctcttcattttagaaaaatatttaaaaaagatgtttttatagatttagtgtgttatagacgcaatggacataatgaagtagatgaaccatctgttacacaacctataatgtatcaaaaaataaaaaatcatcctacttcaagaacaatatattctgatgttttaatatctaaaaaaataattacatctgaaaaaaatcaagaaattatgaatcaatatttatctaaattacaaaaaggtcattatattttctcaaaatctaaaaatatacattttaaaaatgagttttttttagaagaaaaaaagataaaaaaaataaaaaaagatgtaaatttctctgatttaaaaaatttagcttgtttaatcaaccaaattcctgattcagtaaaaatgcaccagagagttaaaaaaatctatgaagaaagattagaaatggctcaaagattaaaattatttgactggggtgctgctgaaacattagcttatgcaacaattctcaatgaaggaatttcctgtcgtatttcaggagaagatgtaagtagagggactttttttcatcgtcatgcttttattcataatcaaattaatggttctatttatatcccactgaataatattagtaagaaacaaggaaaatttcaaatttgggattctgttttgtcagaagaagccgttttagcttttgaatacggatattctttatcttctcctaatacacttactatttgggaagctcagtttggagactttattaatggtgcacaaatagtaattgatcagtttataagctctggtgaacaaaaatggaacaaaaaatctaatttagttgtgcttttacctcatggttatgagggacaaggacctgaacattcatcttctagaattgaacgatttcttcagctttgtgcagaagaaaatatgcaaatatgtataccaactacatcatcacaaatatttcatatttttcgaaaacaaatatttgataaaattttaaaaccattaattatttttactcctaaatctttattaagaaatccgatggctagttcttcttttgatgatcttgtctatggtaaatttcagaaaatattagatgaagttgataatgttaataaaaaagaaattcgtctcattttttgttctggaaaaatatattatgatttattacgaaatcgtcgtgaaaaaaaaattaattctattattttaattcgtattgaacagttatatccatttcctgaaggagaaatattaaaaatattaaaaaattatttttatataaaagactttatatggtgtcaagaagaaccgtacaatcaaggtgcgtggttttatatcaaagattgtttaagtaatattttaccgttagatgcttcgctaaaatatattggtcgttcctcttcagcttcacctgcagttggttatatttctatccacaaaaaacaacaagaaaaaataatttataatgcattaaatattaattaaataataggataaagaatgaaaaaaataaatattcttgttccagatttaccagaatctattagtgatgcaacagttgtaaaatggcacaaaaaaataggagatacagttcactgtgatgataatatagttgatattgaaacagataaagtcatgttagaagtatcttctccatgtgatggaatattacaatcaattttagaaaaagaagggaaagtagttatatctcaacaaacacttggtgaaataaacaaatctactgtggttgataaccatctttccaataatcatattattgaaaaagaagataatttattaaaaaaagaagaaaaatatataactacggaagaaaaaaaagaaatagaatatttattaaaagataatcacaaacatctgactccatctatgagacgatcagtcaaaatacataatattaataatggttttttaaatcaagtgatcgaaacaagtaaaaaaactaattttgaaaatattataaaagaagaaaaaaaagaatcgaatcaaattttattcaatcataatatatttaatgcgaatgaaaataataaaaataataataataaggttacgaatcgagtaaaaatgactcgattacgacaaagaattgcagaacgattactagatagcaaaaataatacagctatgctaactacttttcatgaagtaaatatgaaaccaatcatacttttacgtaaaaagtatggtgaagattttgaaaaaaaacataatgttagaattggatttatgtctttttttgtaaaagcagtcattcaagcattaaaaaattttccagaaattaatgcttacatagatcaaacagatatagttttttataaaaatttcgacatcagtattgctatttcgacgccaagagggttgattactccggtaataagaaatgctgatacaatgacaatggcagaaattgaaaaaaaaataaaggatttttctataaaaggattgcaaaataaaatcaatataaaagaattaatgggtggcaatttcaccattactaatggtggtgtttttggttccttaatgtcgactcctattattaaccctcctcaaacagccatattaggtatgcatgtaattcaagaacgtccagtagttgtaaatggacaaattaaaattcttccaatgatgtatttagcattatcttatgatcatcgtttaatagatggaaaagaatctgtcggttttttaatcaatataaaaaatatattagaagattttaatcgtattgcaattgatgtgtagaattatttttaataaattaatatatagcgcttaaaaagtacgatcattaaattacttacaaactagcgtacttttattatataaaaaaagaggaaaaatgaaaattaatcaagtagttttaattagacatggtcaaagcgaatggaatacattaaataaatttactggttggcatgatgctgaattagataaaaaaggaaaagatgaagctaaatttgctgctatcttattaaaaaaagaaaaatttttttttgattgcgcacatacatcattattaaaaagagcaattcatactttgcaatatattttagatgaattaaaccaaacctggttgtcagttaaaaaatcctggcgtttaaacgaacgacattatggtgcattagaagggttaaataaagatgaagttattgagaaatatggacaaaaacaagttcttctatggagaagaagttttgatattagtccacctcagattaatataaaagataaacgctttccaggaaacgatccacgctactctcatttaaatattcatgacatccctctaggagagagcttagaaaaaactgcaaaacgagttattccttattggaacaaaattgtttatccagaattaaaaaataataaaaaaatacttattgtagcgcatggaaattctttacgtgccttgatacaacacttatataaaatagacaataaagctattttggatttaaatattcctactgcacaacccattatcttagatttcgataatgaaaaaaatccaattaaatggcactatttaacataattttattaaaaaatatttctttacattccttaatacttcgatactaaatttatctagttgtatttatatgaattaatataaatatatttttaaaataatcatttttaatagattttttaaaatttcattatccatgaaaaacaaaaaaataaaattttataaaaatcaaaacaagaggttctaatgattaaaaaaattggagttttaactagtggtggcgatgctccagggatgaatgccgcaattagaggggttgttagaacagcacttagtgaaagattagaagtatttggaatttatgatggatatttaggtctatatgaaaaccgtatggtgcaacttgatagatatagtgtatctgacatgattaacagaggtgggacatttttagggtcagctagatttgctagtttttatcaagacaaaatacgctcaattgcagtgcaaaatataaaaaaaagaaaaatagatgctcttgttgtcattggaggtgatggttcttatataggagctcaaaaattaacagaaatgggtattccatgtattagcattccaggtactatcgataatgatgtttcaggtactgattatacaataggttattttacagctttacaaacagtggttgaagctattgatcgattgcgcgacacttcttcttctcaccaacgtatttctattgtagaggtgatgggtagacattgtggagatttaacattagctgcagctattgctggtggatgcgaatttattgttttaccagaaattgactataaaaaagaagatctagttatcgagattcaagctggcattgctaagggcaaaaaacatgctattgttgccataactgaatacatttgtgatgtagaagaattagcacaatatattgaaaaaaaaactaatcgagaaactagagcgacaattcttggacatatccaaagagggggtgcacctgtagtatatgatcgtatattagcatcaagaatgggtgcatattcagttgaattattaataaaaggttatcagggaaaatgtgttggaatacaaaatgaaaaaatggtttttaacgatataaaaaacgcactaaaaaatatgaaacgtacttttaaaaaagattggttgattactgctaaaaagttatactaatataaaattagtgccggtttcaccggcgctctagtttttaaataaggtaatataggttttaaaaaatgaatatttatagaaaaaaaaatatcataaaaaaatgttttatggagttttttggaacaggtttggtaatgttttttggcataggatgtttagctgcttcgaagttaacaaatgctaattttactcagtttgaaattagttgtatttggggctttggagtgtctatagccatctattttagttcttcaatatctggagctcatttaaatccagctgttactatctttttttggttgtcttccaaattgaataaaagaaaggtcctaccgtatatcatatctcaaacacttggttcttttttttttacgatgctaacatattatctttataataatttattaatttcatttgaaagaaataataatgttgtaagaggaactcaggaaagtcttaatttagcttctattttttgtgtttatccgaactataataatagttttatttacgactttataatagaaatattttcaactgcactttttattctgattgtattagaatttaataatagaaacagtaattattttttatataatagatctgtagcacctatcttaacgggttttttagtctgcatgattaacttagttataaatcctttaaataatataagtttaaatccagcccgagatttaggtccgaaaatacttctaagtttaactggatggggtcttttttcctttactggaggaaatgataatattttatattgttttataccaataatgggtcctattttaggagctaatttaggtggttggatacacaaaactctaatcaataatagttaattatttttttatgaatagtgttcgtgtgctatttttataatttctaaaaattctttagcacttaaagatgaatttccaattaataaaccattgatgtctggttgttcaataaacttttttacattagtatgattaatagatccaccgtattgaattattatatcatttctattgattgagctatattttaaaatataattttttataaatacatgtattagttgaacatgttctggatctgctgatacaccagttccgatggcccaaataggttcataggcaattattatatttttaaatgctgatgtgcctaaattttttaatatcaaatttaattgtctttgaataacctgctcggtttgattatgttttttttctatttctgtttcacctacacacaatataggtgttaaatttgattttttaattaaatgaaatttttttgcaatgatatcatcagtttcatgatgtaaaaaacgtctttcggaatgccctataatcacatattttactcctatatctcgcagcatcaaaatagaagtttcaccggtaaatgctccgtttaaattaatatctacgttttgcgaaccaagaaaaatgttcatattgcttatatttttacatactcgttctaaatatatagttggaggagcaataataacagtgtttttttctaaataacttgatgaatataattttaaatatttgaaaaaactagaaatcatttttatatttccatttaatttccagttagctgtaatgaagaattttttcatatttcaccttagtgattttttaaatgatagaaactaagcttcttttatgaaaaagttatatcaaacttagtttctattataaaatacattaagaagtattatttatgtatatttgctcgatctcgtaatttttttcctggtttaaaataaggtacatatttttcatttagtttgactgatttgccagtcttaggattacgaccaatgcgagaagatcgataatgtaaagaaaagctaccaaatcctcgaatttcaattctttttccatttgctaatgatattatcatgtgttctaacatttcttttgcagcacgctctatcattttatttgaaatattaattttttgttcagcaattctttcgaatagttctgattttatcataaaccctctatatttataaattttaaaaattcatttattttttattattttaaaatattattgcataatataatttattttccatgaaaaattaattattcagtatttttagcagctttgaatgcttctgtcattacgttagaaaaagaatcgtcatttgttttattgttagaaggtgctgttaagtcttttttttcatcttcatctatcatatgaattgtaagataaataattctattttttcggtcaaaactcgataatttaactaaaattttatcttcaatttttaatttattgatcattgtttcagaataaacacgagtaatttcagttaattttattacaccttctaaattttctggtagttttacaatgatgttttttttatctaaagatttaattattccagtaataattgcaccttttttgtgatttgcaatatatgtattaaaaggatcttcttctaattgtttaatccctaaagatatacgttctctttctgcatctacttgaagaactacagcagaaatttcatcattctttttgtattttacaactgcttcttcaccaggtattgtccaagaaatatcagacaaatgtactaatccgtcaatgcctccatttaaaccaataaaaataccaaaatctgtaatggattttatttttccaagaacatgaaccccttttttatgagtttcagaaaactctttccatggatttattttacattgttttaaaccaagagaaatgcgacgacgttcttcgtcaatatctaacaccattacttcaactacatcattaactgtaactacttttgacggatgaatatttttattagtccagtccatttcagaaacatgtacaagaccttcgactccttcttcaatttctacaaaacaaccataatctgttaaattagttacacggccacttaattttgtttcttcgggataacgtttagagattgctatccatggatcttcgcctagttgttttaatcctaatgatacgcgtgttctttctctatcaaattttaaaattttaatattgatttcatcacctacattaactatttcactaggatgtttgactcttttccaagccatatcagtaatatgtaaaagaccatctacaccacctagatctacaaaagctccataatcagttaaatttttaacaatacctttaacgtgcatcccttcttgtaaattttctaataattgatctctttcggcactgttttctgattcaattacagcacgacgtgaaacaacaacattattacgcttttgatctaattttattactttaaattctaactcttttccttcaagatgtattgtatctctcactggacgaacatctactaaagaaccgggtaaaaatgcacgtatatcatttaattcaacagtaaagccacctttaactttaccattaataattccaatgactgtttctgatttttcatgagctttttctaaaatcaaccacgcttcatgacgttttgctttttctcgagataaaagtgtttctccaaatccatcttcaatagcatctaaagcaacatcaatttgatctcctacctgaatatctaataaaccttgagaattttgaaattgttcaacgggaatagcagattcagatttaagaccagcatcaactaaaaccatatctttttctatagagacgatggtgccgcgaataatagaacctggacgagttttaatttcttttaacgattcttcaaataattgagcaaaagattcattcatattaataattttgagaaatttttattgaacgttcatcttaacttcatgctaaaatgagcctgttttatatatcttataataatccttattaaagagtgtgatatcaaaatatcaaattaatttttaatcatgtttttatcttttcaataatatatcccatggcagttttaataacttccgacaaactcatataagtagaatctaatattatagcattttttggtatgcataaaggagaaattaatcgattttgatcacgtttatcacgcgtcttcatttgtataaataatttctgaaaatcaacatgataaccatttttttttaattctaacattcttcttttaacacgtacttccaaatcagcatttaaaaaaaatttaattatagcatctggaaatactactgtacccatatcacgtccttctgctactaaacccggcatacatcgcatcaacctttgttttttgagtaaaatttttctaacacgaggataaactgacaattgagaagacactttactaattatatctagattttttgacttataaaaataattaatagtttttttttaattaattcggaatctagattatctaataagttaacaatatttttttctatcatagtaatatttttatttaataccaaaaatgctagtaatctataaaattggcctgactctaacaacgaccaattcaatttatttgctattattttagaaagagagcttttgccaacaccactagggccgtcaatggtgacaacaggaatgtgatttatcatattttaatttttttattattaaaaaattgtattaaaatttttttttaaaaattcatcagattttactgatagataaaaaatctttaaaataagatggaaaagtttttgaaatacaattaggattaagtatgttgacacctactccagataaagatataagtgaaaaacacatagccatgcgatgatcgttataagtttcaatactagagtattgaaaaaaaataggtggagaaatagataaaaagtctctaccctcttcaactatagcaccgatctttcttaattctatagtcatggcagataaacgatcagtttctttaactcgccagttatatatatttctaataatcgtcgtgcctttagaaaaaagagctaaaattgccacagtcattgctgcatcaggaatatggttcatatctaaatctattgcgtttaatttattacgggtacaagtaatagaatagtcttcccaaaaaattgtcgctcccattttttcaagaatatttgcaaattctatatcaccttgaatactttttttgccaacaccagtaactttaatagaaccacctttaatagcagcagcagctaaaaaataagaagctgaagaagcatctccttcaattgtatattttcctggtgttttatactgttgtttacctttaatatagaatacattataagaatcatgttcaatattgactccaaaaattttaattaaattcaatgtaatatcaatataaggtttagaaactaaatttccttttataaagattgtggtatcttttaaagcaagaggagtacttattaataatgatgttaaaaattgactagaaatattcccatttaaaaaaatagaacctcctaaaaaacccccttttgtacatataggaggatatcctttattttttttatattctataacagcacctccttgtattaaagcgtcgacaaggtctccaatcggtctttcgtgcattctatcatcgccatttaataaaatgttatttttatgtaaagataatacagaaagaagaggtcgtatagcagtacctgcatttcctaaatacaatgaaatagcttcagataaatgaaaaggtcctcctattccttgaacatgacatgtttttttatcatcagataaattatacctaactcctagtttttttaaagcattcaacatgtgttgagtgtcatgactatttagtaaattagttaaacatgttgtgcccttagctattgaagaaagtaataaaactctattcgaaatactttttgaacccggcaaacaaacagttccatttacatgagagattggttttaaatcaagagaattttgcatgataaatatacgctctatttaattaaagttcaaaaatagtattttaaaaaataaactagagataattcatccatatcgcttttcaaaatacgacataaattttactaaagattcaacaccttctaatggcatagcattataaagagatgcacgcattccacctactatactatgccctcttaaataatttaaacctgttttagaagcttcttttaaaaaaatataatttaatttaggattaacaagatgaaaaacaacattcatttgtgatctgtgtttactatttattttatttatataaaaatcactattatctatttttttgtataataaatctgatttttttttatttaatttttcaattgctttcaaaccaccttgtttttttaaccatttaaaaactaatcctgatagataccaagcaaacgtaggtggtgtattgaacatagaatgatggtctgatatttttttataatctaaaatcgaaggagtcatcttcgacgaatatcctataatattttttcgaataataattatagttatgcctgcaggaccaatatttttttgagcacctgcataaatgagatcatagttttttatgttaattgaacgcgataatataaaagatgaaaagtctccaacaacaattttgttttcaaagaccggctcttcataaattgataatccatctattgtttcgttcggacaataatgaatatatgcagaattttcgttaatattccatttatgcattggtaaaagggattcttttacaccattagtttctctgataaatatagatcgaggagtgcagtattttttagcttccatgaaagctgaatttgaccaataaccactattaatataatctgctgtctgtaaattattcaataaattcattggaatagcggaaaattggcccctagcaccgccttgacaaaacaatactttaaaagaatctggtatttttaataaatctcttaagtctttttcagcttctaaagccatttgaataaattcttcactacgatgactgatttccattatagaagaacctaaattcttccaattatgcaattcttttttagcctgattaagaacatctcttggaatcatagctggaccggcactaaaattataaattaaattcatgattccaccaatgaaattttttctattttattaatcaactagtttataaattctaatccctgcatatatttcttttgtaaaactttgggaatctctatgcgaccattagaatgttgataattttctaaaatagcagctaatgttctgcctattgccaaaccagaaccatttaatgtgtgtacaaaaaaatttttttgttcagatttttttctataacgagcttttatacgacgagcttgaaaatcgctcatattagaacatgatgaaacttctctatattttttttcagaaggaaaccaaacttctaaatcgtaagtttttactgctgcaaaacctgtatcccctgtgcataaaagcatttttctatatggtaaatttagaagttgtaaaactttttccgcatgattagttagtttttctaatgcttcataagatttctctggtttaacaatctgtactaattctactttatcaaattgatgcaatcgaattaatcctttagtatcacgtccataagaagatgcttctgatcggaaacaaggagtatgtgcagttaacatgataggtaaatctttttcgtctatgatttgatcatagactaaattagttaatggaacttctccagtaggaattaatatgtacttttttttatctgtcaaatttatatggaataaatcatcactgaattttggtaattgtcctgttccatatagagcttcagaatgaactaaataaggaacataagattctatataaccatgttttaaagtatgcaagtctaacataaattgactaagtgcacggtgtaaaagagcaatttttcccttcattataacaaatcgtgatcctgacatttgtgcagaagatttccaatctaattcgttaaatttttttcctagctctatatgatcttggatttcaaaatcatacttctttttttgaccccagtatttaatttctttattattaatcgatgtatttccctctggaacatcgtcagaaggaatattaggtatgcacatagaaaaatgatgtattttttcttttaaagaattaagttcaattttagaagcgtttaaatctttacttgactgtataacttgatgtcttaacaattcatttttattcttaatatttttgttttctttaaataaatttgataaagcattatgcttaaattgcaaattttcagtttgaatctgtaaagtttttcttttttcttccatagaagaaattttagaaatatttaatttataacctttttttaatagttttttggctgttaaatgtaattcatttcgtaataaataaggatttaacatagagtgttttgctctttttgattatcaatgaaattgtttttttaaaaaatgttaaatttttttataagtgaatcatatatacaaaaaaatattaagttttatttataaaaacaaagaatattctttaaatctaaaataataatcttaatagattaaaatctattttatattatttaaaaaaatataatagtgctgttattaaacaatttaattaaaaataacgctgattattttatattccaatattgtacaaaaaaagaattaatttttaatatcgtataaaaactataatatttattatattctcaagcaactacattacagagatattttttaaggaaattaaagtggataaagttaagcatagtaaaattattattttaggatctggaccagcaggttatactgcagctatatatgctgcaagagctaatttagatccctttttgattactgggacaaataaaggagggcaattaatgaatactaatgaaattgagaattggccgggagattataataaaataagcgggtcagaattaatgaatcgtatgtataaacatgctattgaactcaagactaaagtaatctgcgatactgtaatttcagtaaattttaaaaaaaaccctttttttttaataggggaaaataataaatatactgctgattcagttattattgctaccggagcaaatcctcgttatttaggactacaatcagaaagtttatttaaaggaaaaggtgtttcaacatgtgctgtatgcgacggttttttttataaaaacaaagaagttgcagttgtaggagggggtaatacagctatagaagaaacattatatttatctaatttcgttaaaaaagttcatttaatacaccgtggaattaattttagagctgaaaaaattttacttgacagattggaaaaaaaaataaaatcacaaaaaataataatttatttaaattctattgtcaaaaatatattaggaaactcttctggagtgacagcgttattaattgaacaaaagaactcaaaagaaaaaacagaatcaaaaattcaagtttccggattatttgttgcaatcggatacacccccaacaccaatatatttgttaataagttaaaaatgaaagatggttatattcaagtaacacgacaggaacatggaaattacactcaaacaagtattcctggtatatttgctgcaggggatgtaatagatcacgtatacaggcaagcaatcacatcctctgctagtggctgtatggcggctttagatagtgaacgttatattaattctttagtataaaaaaaactgcatattgagaatattatatcatttaaatactagtcaaaatgactagtatctgatataattaataaagttttttaactataataattatgagaaaaaaatgtctaaagaagaaaatattgaaatgcagggagtggtaatagatacgttaccaaatacaatgtttcgtgttgaactagaaaacaaacatattgttacggcacatatatcaggaaaaatgagaaaaaattatatcagaatattaacaggagataaggttaccgtagaactaacaccatatgatttaaccaagggaagaattatttttagaagtcgttaatagaagctcgaagaaaaaataatattaaaaacataaaaaatcaattattctctgataaataaaattcacttccccaaacttatctatatttaaaaaatcttttaaaaaaactaaataaaataaattttttcttattttaaaaaataaaaaaaattttaaagagaatttatgcgtactaaatattgtggaaatattcgaatcagtcatgtaaataaaaaagtaaaattatgtggttgggtacataaggtaagaaaccttggtcaatttatttttgttgatatgagagattatactggactcgttcaagttatatttgaattaaaaaattataaaatttttaaaaaagctttaaatttaagaaatgaattttgtattcaagtttttggtacagtacaaaaaagagaaaaaaaaaatcaaaatataaaaattagaactggagaaatagaaatattagcaaatgtattaaacattttaaatacttctaaatcgttaccattaaattttacgcaagaaaataatgatgactcaagattgaaatatcgatatttagatctgcgttcttttgatattttagaaaatcttaaaataagaaataaaataacttatttaataagaaattttatgacaaaaaaaaattttttagatattgagactcctattcttactaaatctacaccggaaggtgcaagagattatttagtacctagtcgaaatcattacggaaaattttatgcactaccccaatctcctcaactattcaagcaaatattaatgatttctggaatagatagatactatcagatagtaaaatgttttcgtgatgaggatttacgttcagatcgacaaccagaattcacgcaaattgatattgaagtctcttttatgagtgctaaaaaaatacgtaatttagtagaaaatcttataaaaaaactttggttagaaataagaaatattaatttaaaaaaatttcctcaaatatcttttcatgaagctatgaaaaaatatggatcagataaacctgatttacgtaatccaatcgaaattattgatgtgtctaatatatttaaagataaaaaatttatatcattttttaatttaaatcctcaaaaaaataatagaatagcattattatgtatttctaaaggtgcacatttaagtagaaaaaaaattgatgattatactaaatacgtacaaagatttgatgcaaaaaaattattttatatgaaaataaaagaatgcaaacttggatgtttaggtattcatagttctataaaaaatattttagatgaaattattttaaaagaaattatagaaaaaagccaatctaaaaacggagatatattatttttaattgctgatcaggagcatattgtcaataagtcacttggtatgttacgtttaaaaataggaattgatctaaatattactaaaaaaaatagatgggaacccctttggatagttaattttcctatgttcgataaagatatacaaggaaatttatcttctgttcatcatccatttactgctgtgaaaaatatggatagagaaatattaaaaaattcacctgatcttgctatttcagatagctatgatcttataataaatggttatgaaattggtggaggttcagtacgtattcatgatgttaacatgcaaaaacaagtttttgatattattggtataaaaaaatctatgcaaaatgaaaaattcggatttttaatagaagcattaaaatatggtgctcctccacatgcaggtatagctttaggattagatagaatagtcatgcttttaactaacagtaaaaatattagagatgttatagcttttccaaaaacaacatcagcaacctgtttaatgaccaattctcctagtacagtagataatttattgttacaagaattagcaataaaacatttaaaaaaataagcttttatttttaataaaaatgtttttttatgttacttattaaacataaaaaagaagaacataaaacaatagatggactagctggtgtattataaaaaacagataaagatattcctcctgtaacagataaaatacttactataatggcaattataaccattttttccggagaacctgaaaaatgttgagcagttgcaggtggaataattaataaagaagtaattaataacgcacctacaaatttaattgctatagcaatagtaaaagctgtcattaacattatagttaaacgggcataaagcacgtttataccgtctatttgagataattcctcattaatagttgatgataagatagaatgccaacgaaacagcagaatacttagtattaatatactgcttattgaaatagtgattaaatcattttttgttacagatagtaaatcaccaaataaataatttgtaatatttatttcttttttagaagatatcaaactaataaagaccattcctaaagataatgaactatgtgagattatatttaatacagtgtctaatgaaacgggtaatagctcttctaaccatgccaaaataatcgcaatgaaactcataagaattagaatagcataaaatgaattaatattgaatgcaatagataatgctataccaagtaaagaagagtgtgataaagtatcaccaaaagatgacatacgacgccacacgataaatgatcctaatggaccagttgttaaagatagcaaaacacctgctaaccatcccggaaaaataagttcaaacataaaaaccactctataattactatgttatttttttaaaaaaaacacaatgttatatatttaaaaattatgaatatgattatgattatgatgataaattgctaattcttgaacacgttttaatccaaatatagaaataaattctagattattgcaaacagtttctggggttccagaacaacaaatatgattatttagacaaataacatcatcagttttcgccataacaaaatttaaatcatgagaaacaattaaaatagcacattgtaattcatgtcgaatttcattaattaatttatataaagctaattgtcccattacatctactccttgtgttggttcatctaacaccagtagattaggattgtttaacaaagctttagcaaaaagtattcgttgcatttctccaccagataatttttgtaattgacaaaattttaaagattctgcttttacacgttttaacatctcttctatttttatgttatttgtttttcgtgataatttcataaatcgttctaccgtaataggaagaagagtattaagatgtagtttttgaggtacataaccaacagataaattgtttgaacgaataattgtacctgaattaggttttattaatcctaaaataatacgtactaaagtagattttccagctccattaggtccaattaaagtaagaacacgattagaaattaatgataacgatatatcagtaagaatagaacgatgagataaattcacacaaacattttttaattttacgaattcaaacatagttttataaattattttttttaaattctaatattataggatatattttaaaaaataaaaattaatattatatgaaaaaacaatagtattgattttcaatttattattctttgttccacgttagttaacaacaaaatatttgaaaatactgggatatgttataaaaaattatcaattaacagaattttatagacttaattatattataaaaatctatactcaatagttattcttaatacatactttatatatataaaaaaatagtgcctattcataaaaaaaataaataatactaaattttcaagaaaattaaaaacattttttaaaaatatagtagtaaatatgttaaaactgtttaatatgcactataagtgatacttagttcaattaagattgatttatgttaaaaaagatactttcttattaattttcttgtgaagtatatttataaataatttttaaaaatattatttatccatattttttaaacaataccttaaatctgaataaaaatttataaatataaaaaaataaagaattaatcttataaaacagaattatcatatttttctataattatctaatataaatattagcgtttttgtttatcatttagaataaataccagaaaagataattttaaaataattaatataaaaatataaataaaatagttttatttaaattctttatcatatattttttaaatagaatacctttaaaaaatatgatacatacgaaaaatatttcttttaatttttttatatatttaatttattaaaatataatgcattcattacgtaattgatttctttattcatacctatttgttagtttttaaaaaaataaaaagattttataaaaaaaatttatctatttttagaaatacatataattttttaaatattacttaaaattgatattacttaaaataattttttatttttattagaattaacattaagtattgaatacattttgatatttaattaaaattcaacataaattttttctgattttaaataaaaatatatcaaaagaaaaaatacaatttttaaaaaaatattttgaaataatattattaaatggtaaatctcctttattttatattaaatattctttttttcattgaaaattatagaaagatttaaaagaatcacatttttcacatgaaaaatgacatttatcttatattaataataaaaattaatatatataatattcaaaaaattttttagtttaaatgtaaaaataagaacaaaatacatgtaatcacggaaacaagtgttaaaaaataaaatttttaataataaaaaatcatactacttttaaaattctactagtattagtttttccgatttttcccataatatcaccttgagttataataactaactcgccacgacataaaaaacctcgtttacgtaaaagaacaattgcttcattcgcagctttaaaattattatttttactattaaaatatataggagtcacacctctataaagacttgctaaatttaaagtttctttattttttgataaagcaaaaataggcaatccagatgtaatcctcgatgtcattagtgcagtcttacctgattctgtcatcgttataattgctgtaatacctttcaaatgattagcaacatacattgcggacatagcaattgcttcttcaatatcatcaaattttgcatgaatacgatgtctagatacattaatactaggaactttttctgcacctttgcaaatttttgccatttttataacagtttcagctggatattcgcctgatgctgtttcagccgaaagcataactgcatcactgccatctaaaacagcattagctacatccataacttctgcacgagtaggtaatgggttagtaatcatagattccatcatctgtgtagcagtaattactattctatttaattgcctagcagttcgtattaattttttttgaatacctgctaattcagaatctccaatttccacacctaaatcgcctctagctatcataattgcatctgatgctaaaattatatcttcgatagtattttgatttaatacagcttcagcacgttctattttagcgataattttagcattgctaccaaattctttagctaattttcttgcttgtttcaagtcattactgcatcgtgggaaagatattgctaaatagtctacattaatttcagttgctaggattatatccttcttgtctttttcagttaacgcatctgcagataaaccaccacctagtttattaatgcctttattgttagaaagtattccgccgataacaacttttgttaatatttcatgaccagttgattttataacctttaattgtattcttccatcatctaataataatacatcacctacttttagatcatatggtaactgtttataatcaattcctacccgttcttgatttccattattttgatctaaattcgcatctaatataaaaaaatcaccaacattcaaaaaaatattattttttataaatttagaaatgcgaattttaggaccttgtaaatcgccaagcaatgcaatgtgaaaatttaaacgagtcattatttctcgagcttgatttgctctggatttatgttcatcttttgaaccatgagagaaattaaatcgaagaacatttactccagaacgaattattttttctaaattattattaatgtctgtagaaggtcctaaagtagctacgatttttgttcttcttaatcgatttaacataaaatacgcctttattgaaagtttccaaaaaaacatttttacacttttatataaatactagtaatataaaatatttatttttatttattaagttctttagtaaaattaattataataattttttttataggtaaaattatagaaaaaacattaaataatatattttaaaaaaatgtgtatatattttaacagttttataaaatcattcctcaaaaaccgcaatttaaattattgcattaaaattttaaattttatatgtaaatttttaaaaaagagaaaattatgataatagaaacaaatcacgcttgcgatttagtaatttttggcgctaaaggagatctaacaaaaagaaaattattaccagctttatataaattagaaaaatctaaaaaaatacataaatatacacgcattatcgcttctggtcgtgctgattggagcacagaagactatatagaaaaaataaaaacagaagtaaaaaattttttaaatgaagaaataaatgatcttatttggaaaaatttgagttctcgtatatttttttgtaatattgatgtacatgaaccattgcatttttttagactaaaaacgatacttaaacaaaaaaaaaatatcatagtttactattgcgctgttccttctaatacgttgaattctatttttatcggtttaggaaatgcacatttaaattctgttccatcgcgtatagtattagaaaaaccattaggagtttgtttgaaaacatcaaaaaaaatcaatgatcaaatttctaaatattttctagaatcgcaaatttttcgtattgatcactatttaggaaaagaatcaatacttaatctttttgctttacgattttctaatacatgtcttttttataattggaataataaaacaattgatcatattcaaattactgtatctgaggaagttggaattgaagatagatggaattattttaatatgatgggacaaatgaaagatatggtgcaaaatcatcttttacaaatattaactattcttacgatggatcaaccaaaaaatattagttctgaaagtattcaacatgaaaaagtaaaaatactacgttctttaaaccccattaatattcataacataaataaaaaaactgttcgaggacaatattgttcaggagttatcaacgagaaaaaagtaccttcttatttagaagaaaatggtgcaaataaaaatagtttaactgaaacctttgttgctataaaagttgatctaaataataagcaatggtccggtgtcccattttaccttagaactggaaaacgtttagcacataaatattctgaaatagtcgttttttttaagaaaaaacctacaaatttgtttaaaaatttaaattcagaattattacaaaataaattaattatacgcttagaacctaatccaaatattatatttgatttttcagtaaaagcaccaggattagaacaagaatataaaatagaaaattcccagctaaaatccagtcaatttagtaagaaatattctaaaaattcaattgatgcttacgaaagattgttatttgaaattatgagaggtgtacaatctttattcgtatgccgagatgaaatagaagctgcgtggaaatggatagatcccatcatacatgcatggaaaaattctaaaaataatgcccctcaattatatatgtctggtacttgggggcctaaaaattctgatttgctacttgctcatgatggtcgtgtttggtatgaatttcattaaaaaaatcttaaaaaatttatccatcttgacttaattaagataactatgatagcttaaaaattaattttttaatattttttataaattaaaataacataaaaaaaatacaggttttcatattaaaaatatttagtttaaaatacatgaaaacacccatcttgctaatcgaggaagataatatcttatgactcgtattgttcttttcttattaactaatttagcagttatgttaatatttagtctaattcttttcctgacaggtattcaatctaatactatttatggtttattaattatgtcaggtttatttggttttagtggttctattttatcgttaattttatcaaagtggattgcgttgcgttctgtaaatggggaaatcatcactcatccacgaaatgaagtagaaagttggcttattaatactgtacgtcaacaatcaattcaaaaaggtattattatgccccaaattgcagtatatcatgcgactgatattaatgcatttgcaacaggtgcacgtcgtaattctgctctaattgctgtttctacaggattattagaaaatatgactcatcatgaagcagaagcagtaattgctcatgaaattagtcatatcgcaaatggtgacatgattactatgaccttagtacaaggtgttgttaacacttttgtgatttttatatctcgttttctttcacaaatcataagcaatgtcatgtcaagcaatcgaaatgagaataatacagaagaaaaaaactctttcgtatattttttagtttctacatttctagaattaatttttggaattttagccagtattattactatgtggttctccagacatcgtgaattttatgctgatgctagttctgcgaaaatggtaggtcgcgaaaaaatgattgctgctttgaatcgtttaaaaacaagtcatgaaccccaagaatctgatagtatgattgcattttgtatcaacggaaaatccaaatcttttttaaaattatttgcatctcatccttctttagaaaacaggatagaggcattatataatcaagaatatatgtagtataaatctatctctcttaatagaagtatagaaatatatttctattaagaaaattaaaaaattgaaacatataaaactattttttaaaagaaatttaaatttgcttttttaaacaaaaatgttataatataaaaacattacgctttttattattaaataaatttttctaggtaaaaataagttacaattctgttatgcatagaatattaaatttaaaaaagtttagagtaaagacgttgatacagcttctcttgccaaatcttaaattcatgccctatacagtaatgtttctgttttctccgtaaaattagcaataagactgataaatattcttaaggaaattacaaaatggctaagattaaaggtcaagttaagtggttcaacgaatctaaaggttttggttttattacaccatcagacggaagtaaagacgtttttgttcacttttcttcaattcaggggaatggatttaaaacattaactgaaggccaaaatgttgaatttgaaattcaagatggacaaaaaggacctgccgcagtaaatgttttttctctataaaaaatattacttaataaaaaatttttaaaagccctctgttaaacaatcagaggactttgttttttaaatttttaaaataacatattttatatataaacaagataatctgttttgatattaaaatacttatattgtaacctctaaatacatttattattaataataattttaaaataaatactaacttcataaattaattcttcaaaaatatattcattcacatgacctttttttatcaaaaatatctttaatcttctagatataataaatcgatacatcctattttttatggagtttttctgatggagttttttttagacccgtcaacttgggccggcttattaacactagttatactagaagtggtattgggaatagataatttgatatttgtagcaattttatcagaaaaactacctcctaatcaaagagataaagcacgtttaatcggtttaggattagctctggtaatgcgtttggcattgctatcattaatatcttggattgtaacacttaattctcctattgttcataataaatttttctctttatcaatacgtgatatcattcttttatttggtgggttttttttactattcaaaactacaatggaattacatgaaagattagaaaataatcatcatgaaaattcagaaaacaaaaattatgcagggttttgggcggtagttattcaaatcgttgttttagatgcagtattttctttggatgcaataataacagctgttggaatggttaatcagttattaattatgatgatagcagttatattggcaacatttcttatgttattagcatccaaagcattaactaactttatcaacctccatcaaacagtagtcgtactatgtcttagttttttattaatgattggttttagtttagtcacagaagcgttaagattttgtattccaaaaggatacttatatgccgcgataggattttctattttaattgaaattttcaatcaaatagcacgtcataattttatgaagaatcaatctagaagaccgatgagacaaagggcggcagaagcaattctgagattaatggtaggagaacaaaacaaaaaacaacaaataaaaaaaatagaaataaatagtcaaaagactgattctattcaatcgtcaaaagaaatggaaacgtttaaagatgaagagagatatatgattaatggtgttcttacgttagccggacgatctattagaagtattatgactccacgtagtaatatctcttgggtaaatacagaaaaaaatactgatgaaattcgcatgcaattgttagatacaccacatagtttatttccagtatgtaaaggagagttagatgaaataatagggatcgtacgtgctaaagaattattagtagctattgaaaaaaaaatagacgcatctactttttctagtaaaatactaccaattattataccagacacacttgatcctattaaacttctgggcgtacttcgtcgtgcacaaggtagttttgtaattgttagtaatgaatttggagtagtacaaggattaattactccattagatgttttagaagctatagcaggagaatttccagatgctgatgaaacaccagatattatacaagaaaataacagctggctagtaaaaggcgaaacagatttacattcattacagcaattacttaatactgaagaattgattaaagaagataattatgcctctttaggaggattattaattgctcaaaaaggtcaattacctattccaggagaaataattcatattcatcctttttattttcatattgttaaagcaacagaatatcgtattgatttagttagaattattaaaaatcaagatgacaattaaaaaatttaaaataattttttgagaaaagtatgtccaatataattttatcaattgaaagctcattagactgttgctcagttgctatatacaaaaacgagtatattcattctttatcagagaaatgcaaaaaaaaacatactacacacatattacctatgattaaagaaatattatcgcaaactaaaacagaatttaaagagttgaattatgtttccttttctaaaggacccggaaattttacaagtatacgaattgcagcaagtattgcacaaagtctatctatcagtttaaaaattcctataatcagtgtttctactttagcaattatggctgagaaaacatttcggaaatataaacaaaaagatgtaatagttgcaatacatgcaaaaaaaaaacaagtatattgggcaaaatatacaagaaataaaaactctatttggataggagaatacactgaatctttattagaaaaaaaaataattcaagaaaaaattgaaaatttaaaaaaaagatggactttagttagtgatcaatctgaactaattgaatttcaaaacatattaaatgtaaaaaaaaattatgttttccttcctaatgcaaaagatataataccatttgtcttattaaaaataaaaaataaaaacaagtcattttctatagaaaataatataaattatttatataatcagttttagaaaaaccttattatttatataataaaaaacaatcaatgctgaaatattaaatatacttcagtattgattgaactaaatttacagtaaataatgaaattcaaattaaaatatttttttgttttaaaatatacatttatttaaaaatttaatcaggtaaaataatatttaactctaatatagaaatatcttcgtttttttgatctaattgaacagttaccatattcggttctatatttacgtatttacaaataacagatagtatttcacgttttaattgtggaaaataatctggttcgttgttgtattttctttgttctgcaacaattatttgtaatctttcttttgcaacattagcagtgtttttgttccgggataaaaaaaaatccaataaagccatactctatctcccgaataaacgtcgtaaaaaactttttttttcttcttcaataaaacgaaaatgacgctcttcacccaacaatcgatttacggtatcactgtaagcgcatcctgcatttgaattaatatctaatattatagattccccttgattggacgcacgaagaacggattgatcttctggaattacacctattataggtatttgaagaatatctaaaacatctgtcatgcttaacatttctccttttttaacacgtctaggattataacgtgttaataaaagatattcttttatgggagtgatgtttttctcagctctttttgatttagatgaaattattcctaaaattcgatcggaatctcgtactgaagaaacttcggggttagtagtaataatagcttcatctgcaaaatatattgctaaaatagcacccgtttcaatccctgctggtgaatcacaaataataaaatcaaaattcatttttataagttctgttaaaactttttcaactcctattcgtgttaaagcgtctttatcacgagtttgtgatgcaggtagtataaacaaattatttgtttttttatcttttataattgcttgattaagtgtcgcatcaccttgaataacattaataaagtcatagactactctacgttcacatcccataattaaatctaaatttctcaatcctatatcaaagtctataacaatcgttttttttcctttttgtgctaaacctgtcccgatagctgcacttgaagtagttttacctacacctcctttccctgaagtcactacaataatccgtgtcatataaaaatgtccttaaaaatacacacttaactgagagaattaatagttaaaaatttattttttaagtaaatttgagctgattttccaataaactctgatggtatctggtctgataaccaatattctccagatatagaaactaattcagcaaataatcctgtacagaatatttttcttgatgtatctccattcgcacctgcgagaactctaccacgaactatgccataaacgtgaatatttccgtctgctactaactcagctccagcactaacattattaataactattaaatcagcatgtttggcataaattttttgccctgatcgcacgggtatatctataatatgcgttttttctactttattgattgtttctttttttttattcttgtaagaattgataaaaaaattagtaataatattagatttattattttttctttcagataaaattggcaatccagaatcaataatatttttcttcaatatgccatcttggcaaccactgactcctacaacgaaaaaaccatgagaaataataattttttttatttttttccaatctaccgtattacataattttgaaacgttcacaataataggggcattcttaaaaaattttggacattcttgaatttttttatataatgattggttgattaaatctatattttgattatttaaatacagtactaatagtgtaaaattgttgcttttaagttcaattgactttttttgcatatttattgctcaataatattgacttatatgcacataaaatttatatatgagtatcgctattattttttaaaaaataaaaaataataaaattttatgcaattaaattatagtataaatactatattataacaatttctatttttgtattagaaacaaaatatatataaaaaaatatttttacgacaattaaaacatatcgatcaaatttgataaggaatagtattattttgttattatctaaaaatagtcaactcatactgcgtcatagaaaaaaatttaaaacaaaaaaagtttttttttcaggaaatatacaagatgattttcctctatctttatctactatgagaacaaaaataaactttcataaatacaatgactgtattgattttaaaaaaaaaatatgaacaataatattgttcataacaatttattaatttctcaagaaatgattcaaaattgtgatgtaataatctattattggcctaaagataagtctgaagcaaaatttcaactaatgaacattatttcatgttctcctattaacactgaaatatttatcgtaggaaacaattctagtggggtaaaaagtgctcctttgatgttaaaaaaatggattgaattagagaagatcgatagtgctaaacattctattttaatttcaggattaattaaaaaaaaagcaatttttgtattagaagatttttttaaaacacatttatggaagaacttaattataaaatcactaccaggagtttttggtcacaaaaagatagattcaggtagtaaattactcgcctctactttttctaacagaataactggaaaagttttagatattggttgcggaacaggatttttatcagcatctctattatatttttcacctgatgcaattttaacattagttgataataatatgtacgcattaaagtgcagtcaatatacacttaattctaataaatttaatgggaaaatagtatacagtaatttatattcaaatgtctttaagaaatttgatctgattatctctaatccgccttttcataatgacttacaaattaatttcaatataatagaaaaaatgatatgtggtgctaaaaaatatttaacgaaaacaggggaattaagatttgtaacaagcagatttattaactgtcattttttattaaataaatttttccaaaaatattatgtaataaaagaaacgagtcagtacaaagtatatcaagctttttataaatgaatttttattgtttttatttaatacccggagcgggacttgaacccgcaaagccataaggccgagggattttaagtcccttgtgtctaccaatttcaccatccgggcataataatttatagaggcgtatcccggaatcgaaccgggttgcacggatttgcagtccgctacatatccaatctgtcaacacgcctgtaacaatattatagaaaaaaaaaaaaaaaaatacaaacaaaaaatgaattattttaaaaaaatttttttgtataaaataaaataaaattccctttgcaataaataatataatgctttattatacgattaacatttttttatttaagttgtttttaaaatttttatatcggagaggtggccgagcggtttaaggcagcggtcttgaaaaccgccgacgagaaatcgtccgagagttcgaatctctctctctccgaaaattaatacattaaaaaaaatatagtaaaatataaaaaatattcaatgtctttgatcttgtgtataaaaaattattaaaaaattaatatagatagaataaaatttattgaacatcagataatacttcaatttctacacgacgatctggagctaaacaactaattaataatggtttattcaccacatctctacatacttgattagttaacggatataattttcccataccttttacggttattttatctctagaaaaacctcgagaggctaagtaattttttatactataggctcgatcttcagataatttttgattgtactcatcgcttcctattttatccgcatgtcctaaaagaacaatagaaacgttttttaactgcatatctttgatatcatcgtctaatttattaagtttatcataagaactaggttttaattccgtactattaaagggaaaatttatattttcatttaatacgctatattgttcgtttaatggttcagaatcatcagatgaaaacatatcacttatatcagatttcccaaacttccatccaatagataaaactgcatctcctaaagcaggtttaatagatgcatttgctatattttttacactatttttccaagtatagtctaatctagtaataaatgtttcgttaaaaatatattcagcacctaaagacagacttggaagcaatgcgctttctttactaaataaattttttaaagtatttttagaagaaagatcattccatgaaactattccacctaatttagtataaagatgaaattcgtctgttattggataagataacttagttgctaattgaacactattagattgtatatgttcgttatttttttgaaatattaaatgagggaaaaaaccatttgtatcattttctatttctaagctaaaatagggattaaattcgtatcctaaaaatagaccaacaattggagcgcttaagttttctattgaagaatcgttattattgacttgagaattattcatatcatattttaaaggattaaaatgagaccatccaaactttgcgcctaaataccatccattttcttcttcagcttgagcagctgaggggattaagcttgccaataaaaatgcaatagcgagagctcgttttttcatttgaaactccattgtttttaggtgaattattaagaaaaataaaactgtatagaataaatattatataataaatattatataataaatattatatataatatatataatacatactttataatacttactactatatttaagaatttttataaaaaaaatttaacaaacgtattcctaaaatgttcatcataaatagatatgtaattccggaaacatatttcccaaaaaataagcgtataattttattaatgaatgtccctatattccagactgacatcatgtgtaatacaacaaacaaaattacaatcataactaatgttgctaatattatataaataataaagatgaattcactacgttgtaaagatacaatttttctttgatacaatttccgagatagcagtaaaaaatttacccaactagttatacttagagataaagcaatacctgcatgctgaaaatagaaaattaaaaatggattcattaattgatttaaaagaagtgtgaacaatgaagccttcatgggaatctttatttcttcgcaggcataaaaagcagatgataaaatcttaacaaaaataaaagagattaaaccacaagaatataatttcaagactcgcgcggtcattaaaacatcaaaatctgtgaatttaccatattgaaaaagaactataattactggtttagcaagaaaaaaaagtattactgatcctggtaaagatacaattaaactaatacgcaacccccaatcaagcaattttttatattctaattttatgccatttttataatttttagcaagagatgtaaataaaacagtacttaatgatacacccaatattcctactggaaattctattaatcgatcggcatagtatatccatgatattgatccagaattaagtaatgaactaaaaatagtattaataatcaaagaaatttgattagctgaagctcctaaaatggctggtcccattttttttaaaattctcaaaagaccgatattattccaatgaaaatttggtaaaactaacatattaattttatataaaaatggtagctggtaaagtaattgaactaaaccacctataataactgaccacgctaaaacaataatagaaggacaaaaaaaagaactaaaaaatacagaaaaaaaaataatacttatatttaaaaatatcggagaaaaagcgggaatagaaaaataattccaactatttaaaatagatgaacataatgaagataaagaaattaataaaatataaggaaacatgattcttaataaatttgtagataatatgagtttttcgggtggatttaaaaaacctggcgccctaattaaaattatagattgagaaaaaaaccctcctaaaatggtaagtaataataaaaaaaagctcataaaacccagtatggaagaaagaaaattttttatatttttttcatttttatcggatttatattccattagtacaggaataaaagcttgagaaaatgtaccatcagaaaaaatacgacgtaataaattaggaattttaaaagatataaaaaaagcatccgtaaacatggaagcaccgaaaatgctagcaattaaaatatctcgaacaaaacctaatattcgagatattaaagtcatcaaacttactgatattaaaggttttagaagattcattcaaaactaacctataaccataaagaaattttaatgtttaatacaagtaaaaactaaaaattagatttaattttttaaattaataaaaaataagtttttaacatatgattaattgaaattaaattaattaattgtaaataataattttacgttaaatattttttaaaaaatatttaaaaaataggttattatcaaaataatacagtttaaaaaaattataaaaaatattaatatatttaaaatattgtaataattatataaaaaagataaaaaaatgtctaaatttgtcaaaaaaataaaaatcattaaacctgatgattggcatgttcatttaagagacaatgagattttaaatcaagttataaagtatactggtaaattttataaaagagctgttattatgccaaatcttaatagtccgattacgagttgtttgaaaagcattgcgtatcgtaatagaattttaaaatcaatgcacttgaattataaattcaaaccgttaatgacttgttatttaactaattccacaagccctaaagaactagaatttggtttttctaaaaaaatatttgtagcagctaaattctatccaaatggttgcacgaccaattcaaaaactggtataaaaaaaattagtgatattactcctgttttagaatgtatggaaaaaataggaatgccattactaattcatggtgaagagattaaccaaaatattgatatctatgatagagaagcaaaatttattgaaaaaacgttagatcctttaagaaaaaaatttccaaagttaaagatagtattagaacatattacaaccaaagaatctgtagaatatatcaaaaataacgatgttaattacttatctgcaactattacaccacatcatttaatgctaaatcgaaatgatatgttttatggtgggattcaaccatatctttactgtttaccgattttaaaaaaaaacaaacatcgaatggcactaagaaaagccatctctaatggagataaacatttttttttaggaagcgatacagctccacatcttcataaaaataaaattaatatgcttggatgtgcgggtatatttaatgctccatcatctctattatcttatgttaaagtatttgaggaaatgagagcgttaaaatatttacaatctttttgttctgaaaatggtcctaaattttataacatgccaattaacaaagaaaccataacaataatcaaaaaaccgtgtaaaattattaaaaaaataaatgttggaagaaatgtgattattccatttttatcaggtgaaattttaaactggtcaattgaaagtgattaaaaatcaagagtattttaaattaaatttctaaatttccatctaagttataggtgacagattttttatatgatgaagacaattctaaaaaacgctgatttaaataaaatttcttattcataataattttattcttaaggttgagttttcttaatataagacacgtattaataatttttttccagtaattatttaatttattattactttcataaggtggaaatatattatattctttttctaaacataatctatcttgacttaaaattatcaatttcttaaacaatattttttttctcttgattaattctaaaatttcttcattagaagtcttagactttaataaattatgacattcttgttttaatattcgttctaaagaatataaaatattttctattttttttattgtatctattaaattattcatatttatataaaaaaaatacatactaatatatttacacaaagataatattacatcaacaaaaaaatgataattttacggagaaactattacctcaccattttcattaataatcccgttgataattttaccactgtttgttttaacacgtatattttgattttgagcaccattacttaatgatttcgctttagaagacattttaaaattattaccattaataataacagtaacctgttgattgactttaactaaccaaaatggacgtgtcataaaagatgttattggttgcaatggaaaaaactcacgtaaacttattctattgaccacatctttctttttacgataagtattgttcggcagtacatctaaacgtcctattaaaatttttaagtctgattcttttattcttgttcctcggggaatttttctattcgctacaatatattctccttcagattgaacttctactgttagatagtaatgttgtttgctacaagttaaaagaatattaattaaacctagattgtgagtattacttaaaatagaaaaatcaggttttctacaatatatatttttttttaatggagtatgtattatgatcttgatactatcttcatttaaaggatattccttttttaaaaaaatgtttaattgtttgtttaaatcaaaaaaattaaatttttgaacagttgcactgaccgaattgattgtaaaagatagtaataataaaaaaaaataaatcgttattttcataactatcattcttttccttaatttatgttaattttatgtttatattaattttatgttaattaaatattttataaatatatttttttaagaacattttcttgatagaaaatatgtaataaaggtataatgaaaatacaattttgattttttatattttatctcgaatgtttattgaaattttttatcaaaaaatagatattctaaaaaataaaatatcacctttatttgtatttaatatgattttcaaataattttttttgaaatgtaattgcaggataacaatatgtttaataaaataaatcaaatttttaattttcatcaacaagcattaaatctttgttctcaagacaagaaatattatctgctaatattgctaatgccgacacccctggatataaatcaatagattttaattttaaaaatgaacttaataaaactctatataaaaataaaaaaactatttttttaaaaaaaacttctcctaatcatttaaatgaaaaacataaaaatttatttttattaaaaactatacctgtactcactaatcaaataaaacaagacggaaacaccgtaaatatggatagagaaagaattgaatttctaaataacagtataaaataccaatcaagtttagtatttataaaaaatgaaattaaaaatatgatgtacgttttaaaaggataatataaattatgtctttattaaatatctttaatattgcaggttcagctatgattgcacaatcgcaaaaattaaatgtaattgctagtaatttagctaacatggatagtacaatatataaaaatggaaaattttatccctatatcgcgaaacaagtcgtattttcattagacactgcaaaaaattcaaaaataggaggcgtaaaaatatctgctataatagatgatcctagtccaatgaagctaatatatgatccaaataatcctatggccaataataaaggttacattttggcttcaaacgtcaatcctattacagaaatggtaaataatatcgcagcagcaagaagctaccaggctaatatagaagtattaaaaacagcgaaaagtatgataatgaaaacattaacaattagtgagtaaaaggagacaaaatgagtactattaatattaattcgtccgatatcaatttacccaatattcaaccacctattataaataatgaagctgtcaaaaaaaatgataataatttaccaaatgacatcaacccaccagatttacaaaaaaattttttaagtctattaattgcacaaattaaaaatcaagatcctactgatcctattaaaaactctgatttgacatcacaattagctcaaattaatacagcaagtggaatgcaaaaactaaacaataccgtggatcaattctcaaatcaaatcagcaaaaatcaaaatatccaattatctacattaattggacgtcatgtgatggtgcctaataaaaaaataatacatactaaagatacgaaaacacaatttggtatcgaattatttgaaaaagctacttcagttgaaataaaaattacagatgacaacaacaaaactttatatctgaaacaattgaaagaaacagaagctggtagacataatttcttttgggatggtcaagatttaaataaaaacagtgtaatgagtggacaatataacatctcagttatagctaaaaagaacaatcaaaatattccggttaatagtttaagtgtaggagtagtcaatagtattattatgtcttctggtaatgctattatcgatttaggagaatctggacaaatcacacctttaagtattcgtgaaattctaaaataaaaaatatattttatttagcacaaatcaaaggaacaaatttatgtcaaatatgatagctataagtggcttactagcaaataatgattacatggaaattatatccaataatattgctaacgcatcaactataggatataaatctcgtaaacctcttttttttgatatgttttctcattcattttattcaaatactactaatggatacggagtgggtatttcaagtattatacaaaactttaataatggcatgttagttgaaactggacgagatttggatttaggaattataaaagacggctttttccgtcttgtagacagtcaaggtcatgtctattatacaagagatgggcaattcttcctcgataaagatcaaaatattatcaatattcaaggtatgtatctaactggacttaatacatcttgttcaaaaagtgattttaataatagatccaacttagaacctattaatttaaaaaattctaatattttaaaaaacaaacctacttctgaaatcatgttaaaagcgtttttgaatcgtaatactgaatcaaaaagcagtgtggataattctgacaacaaactatctaaaccagaagattacatgacttatattagcatatataataaagaagggaaaaaagaagatattactgtttcttttaataaaaaggaaacaaataaatggacagtaaatgtggaatcaaatgattctgatgataaagagactataaaaaatagtttcgatttaacgtttaatgatgatggcgaattaacttctgataatgtttttaatattacatctaaagattctaaaaagtatgaaaatatcactttaaatttaacaggtactatagaacaatcaaattctgatgtttcttgggaagaacattctcaaaacggataccctcaaggtaatttaaaaacatttgatattgttactaatggtgaaattattggaacatattgcaatcaaaaacaacaaacaataggtcaaatattattatcaaaatttatcaatccagaaaaattacaacctgaaagtggtaatttatggtctgctactgcagaatcaggtgaagcaaaaacagcaatgaaagcgggtattcaagaatcaggagtgttaagcaataaaacgctagaagtatcaaatgttgatttgaataaagaattaatcaatatgattatagcacaacgtaattatcaatctaacgctcaatcttttaaaacagaagataaaataattaatacattaataaatttacagtagtctatcaaataggatccaacaatataatggagaattcaatatataaatctatgattgcagcaaatcaattattagagaaacaaagtattatttctaataatttagctaatatttcaaccactggttttaaagaaaaatttatttttgcaatacaaaatcataatgtaaaaaatttatataatagtgataaaaaaattacaaaagaatattataatctttctccaggaatattacgctatacaggaagaaatttagatttatttattaaagatgatggttggttaacagttaaagacacaaacggtcaagaagcatatacaaaaaatggccacttaaaaataaactcaaaaagaaaactgacaattcaagacaatgaagtaataggaaataattgcaatataattataccaaaaaatatcattttaaaaattttatctaatggagtaattacttcagtaaaaaacaagcacaaacatattgttgaaactaaaataggatcattaaaattagtacagctcccttcacaagatctaattcaaaacgaaaatggattattttatctgaaaaaaaataatgaaattaacaaaaaacatactaatactatcaaacatagcaaaaaaatacgcgtacaatcaggaatgttagaagaaagtaatgtaaatgcttctaaaaatatgatagaaatgatatcaaatgctagacagtttgaaatgcaaatgaaaatgatatctatgtgcgatcaaaacgcagaatacgcaaatcaactcattaacattaacaattgataaaacaggataaaaatatgattccttctttatggatttctaaaactggtcttgatgctcaacaaattaatatgaatattatttctaataatttagcaaatgttagtactaatggatttaaacgatctagagcggtttttgaagatttaatgtatcaaacgatacgagaagcaggaacaaattcctcacttgaaacaactttaccgtcaggattgcaattaggtactggagtaagaccggtatctaccgaaagaattcatactcagggtaatctttcaaaaacagatgcttcaaaagatgttgctattaatggatcaggattttttcaagtacaattgccagatggaaatatagcatatacaagagatggctcttttcaattagatcaaaatggtcaattagtgactaatagtggttttcctattatacctgaaattaatattccttctaattctacaaatattaatatagcaagagatggtgttattagtgttgtcgttcaaggacaaacacaacctgttttactcggccagttaaatttaattaattttgttaacaattctggattagaaagtttaggtgagaatttatatcaagaaactcaagcatctggctctccaattgaaactactccgggtttaaatggaacaggagtgctttatcaaggatatgttgaaacttcaaatgtcaatgtagctgaagaattagtgaatatgattcaaactcaaagagcatatgaaataaatagtaaatctattagcacatcagaccaaatgttacaaaaactatcgcaattataataatttatttttaaatatacttataaaaatatgtttggaataatcttgtacattaaatgtatatcattaaaggtaagtttttcgtgataaagttatttatttgtcaaaaaaaatactatttaactgctatttttttattaacaattcagagttgcgccagcgttgaatataaacctttagtaacaggcgctacaactgctatagcacctaatatatggcctaaagtcgttaatggttctttgtttcaggaaaaaatacccatcaattatggttatcaaccattatttgaagatcatcgtccacataatattggtgatacgatcactgttgtattacaagaaaatatcagtgcaagtaatagttctatttcaaatatgagtagagatggaagcgctaacttcggcttaaaaatcgcacctggacaattaaataatatattaggtgttaattttcaagacaatacaactagtttagatagttttggaagaaataatttttctggaaagggtagtaattcagctaacaataaatttactggtcttatcactgttactgtaaaaagagtacttccaaatggaaatttaaaagttatcggagaaaaacaagtttctattaacaagggtacagaatttattcgtttttctggtgtaataaaccctactaatattaacaaaaataattttatttcatccactcaaatagctgatgcacgtattgaatatttaagtcatggtggtcttgacgatgttcaaaaaatgggttggttgcaaaaattattattaaaaatttctcctatatagacatttttttaaaaatgaaatcgttttaaaaaactatttaaaatagtatttcttataaatttaattcaaactcataaagaacgttatttattctttatgagaaaaattaaatatattaaaaaagaataaaattttttataatcacaatatttataggaaataaaatgttttatatgtactatgacacttttaaaaagacagattaataaaggtttttttatgtccaaaaaaatattatttttgataaaagtaattgtttttattttcacaaccttttcgttacctttgtatgctgaaaaaatacgtgatttaactagtattcaagggattagagataatccacttatcggttatggtttaattgttggattggatggcacaggcgaccaatcaacgcaagctccatttactaatcaatcattaaagaatatgttatcacaattaggtgtaagtattccttcaaacactaatatgaacacaaaaaatgtagcagcagtaattgtaacggcaaatcttccgccattcagtcatgcaggagaaaaaatagatgtagtagtatcatctatgggaaatgctagaagtcttaaaggaggtacacttttaatgactcctctaaaaggcgctaataatcaaatttatgctattgctcaaggtaatatattagtatctgaaaaaaataacaaaaaaagtaaaattcataatttttattcaaatcaagtaaattctgggaaaattcatcacggtgcaacaattgaacgagaaatagataataattttggaaaacaaaaaacaatcaacttacagttaaatcaagaaaactttagtacagcgcagcgtattagcgatatgattaatacaaaatatccagatacagctactcctattaattctaaaacagtacaattaaatacttcagctaataatgatgtacaagtacacatgctttccaatattcaagatatagatatttcacttccatcacaagaagctaaagttgtagttaattctcgtactggttctattgttattaatcaatcagtcagattaggttcatgtgtagtttcaaatggaaacatgtctataatagtacatcaaataaaaaataaaaaaagagatttatattttttgaaatcatttaataaaaatataaaaaaagatcaatctatagaagatatggctgataagaattatatgaatgatattgctactaataaagaaaatttgcataatatagttagagctttaaataaattaggtactaaacctgatgaattaatgtctattttacaattaatgaaaagtgctggttgtcttaacgcaaaactggaaattgtttaatgaatgataatttattgttatctaatatatcagattataacgtacaatttattaatgaacttaaataccaagttcgtattaatccaaaaaaacatgcattgcaaactgcaaaagaagtagaaggagtatttattcaagtattacttaaaagtatgagaagttctttgttgaaagataacttattagataataatcaaagtcgtctctatactgatatttatgaccaacaattatctcaagaaataagtaaaaaaggaataggattaactgatattattttaaaacaaattgaaaaataaaacatattataatacaagtaattctaacgtattattaaatatattattttacaagaaaatatattttaaaataaaaaaatcttattaaaaaaggataaaaaatgagtgatatattaaattccgctatttctggtatgaatgcaatgaagattatgattgataataccatagataaaattaatcatcctaataataaaacattaggaaaacgtgttgttatagaaaatactgtacaaaatgaaaataaaaacagtacagtaaaagtaaaagaaatatatgataattataatgattttattttagaagaaaaaagaaaaactaacgcagaagttcaagatgaacaaactaaaatcgaacagctattaaaactagaagatttattatgtgaaaaatctaatattttcagtcaactacttaatgactactatgcacaaatagaagaagatattgttttagctaaaaaaaatgtttttaatgaaaacatacagaagaaattaagcaacatagtttttgccataaaagattttgataagaaattaaaatttttagaaaaagacataaaagattcagttatcaataatttaaaaaaagttaattctttaattgatgaaattcatgatttaactatagatattagatgttttcctgttttaaaatttcctaatagagttgatggtcttatcgaacaacgagatcgtctggtagacgaattaaatggtttaattggaattaaagttattaaagatcatgataattataaacttaatctaaataatggtatatctattatagacaataataaaaaacaaaatttaattgcattaacatctacatcagatgaaagatatataagtgtaggatatgttgatactaacgacaaagtagcaaaaaaaatagaagatatgattccgactgccaccttaggagctcttcttaaatttcgtagagaagagctaacaaatacaagaaataaaatcggacagttaataattaattttgctgatagtattaactcctatcatgcaataggatatgatatgttcggacacctaggtagacaaatttttaacattagtcaaccagaagtaatagctagttcaagtaatcgttcatcttctaaagtatctgcaaaatggcttgttattagcgatgctaaaaatacgaattatgttatatattttaaagataaaaattttatagtaacaagattatcagatcatagtacgattcaacctaaagtacatgtagaaaataataaaacgttatttacctttgatggaattgaatgttctatagaaggtgaaaatgctgataatgatatttatatgatcaaaccctattctaaaactttagaagaattagaattattaattaagccaaatgaaccgtttgcatattcttccacagatgatctcaataatccaaatagaaataatgctataataataaacaaattttataataatgttcttgttgatcataaagaaacacttgatcaagcttatcagaaattttctcagtccatatctcataaatgtaatgcattagaagaagaagtaccctttaaaagaaatatgattggaatacttgaaaataaaaagatgtctatatctaatgacatggaacaagaatatgcagaattaaactatgaacaagagtgctatcttgcaaacgttaaagtacttcaaacggcagaaaatattttaaatgaaataatagaacgttatagctaaaagactttttaacatacttataaaaaataaaaacttacttttaaagtaagtttttattttttgtctaagtaatttattttatcaataaaaattatttttattaaacggatttaatggtttaattcttttattaaaaaatatgtttaatatgtaaaagaaatattttatttaagttttgagacaggtgaattagaaaaatttgttgcagagtgtactcctgcagaatttttccctctaagacttgatttcatcattgataaattataatgaaattctttttcttttttatttaaatctgattgtttagaaatttttgttattggcgcactagattgatgtattttattttttctattacatgttcttttataaagaaaattttttttatctaaaataaatacatttctttttttagttctctttattaattgagattgcgtaacttcttgattttgaatattattttttacatattttttaaatgaatatgtttcatgttttattttttttattccagaataattatttttattaactattgtatttgtttcggaaatagaagatatatgcaatatttgttttctatttaattttttttgtttttttgtttcatctaatatagcaattggatatttaatccaaacttttcctaatgctaattctaatgaaaatactgaagaaaatatgaatattggagatgtaacagaagaaaattttaaaaagctattattagtattttgatttttaaaaattttagttctgttaaatattttataaaatatataattattattaatgatattaattacattatatctattcattaaaacatgcttcaggtaagaattttcatgtatatttttctgtatcaaatcatttttttttgttatatttttttttctttctatattatcatacaaataatttgcactagatgtatctaattttttgttttttaaaggtatattttctatatttgcttcaaacagtttagataaaatcactctttttttttgattattattttttttgtttaaagaactatatttttttttaaaaaaaatattattcgtattttttaaagtattctttttaaaaatatcgcttgtaatcaacatattcttaataaaaaaagaatttttaaaccaagtgatcattttaaatataaaatttctgttatttgataaaacttttaacaatatattattataattattcttttttaaaatattttcttgtgcttcttgtattttattataacaattatcataaaaattaaaattagcaacatctaaaatttctttctgtttttttttcaagagatttttttttaagaaacttgtaattttactctgacgaatattagaaagcccatatcttgtataatttttactttcactttttctgatcctagaaacagaataatgaggagttttcatctttttactaggaacaattatagtttttccaccagcctgacgtttctcaattgcatgaacagcatctcttttttcatttagtaaataacacgctatttctactggtacaatagcacgtacttcatatgtattttcttttagtgcttcttcttcaattaaacgtaaaatagacaaagataaagattcattatctctgatagtccctgttcctgtacatctcggacaaatatgatgactagattctcctagagacgaactcaatctttgtctagacatttccaacaaaccaaaacgagaaatttgaccaatttgaatgcgcgctctatcgtcccgtgcaatttcacgtaatctattttcaatggctcgctgatgactaatagcggacatatctatgaaatcaattactattaaaccgcctaaatctcgtagtcgtaattgacgggaaatttcatctaccgcctcgagattagtattaaatgctgtagatgcaatatcagttccacttgtagaacgagaagaattgatgtcaatagctgttaaagcttcagtgctatctaccataattgaaccaccagaaggtaatctgacttttctttgaaaagcagaattgatttgggtttcaatttgaaaataactgaacaaaggaacttctccgctatatagctttattttatttacaaaatctggacgacctaaaaaagtaatatgttttcgggctaaatctaatattttaggattatcgattaaaatttctccaatatcttgacgtaaataatctctaaaagcacgaacaataatattactttcttgatgaatcaaaaatggagcagtccgactttttgctattatttgaatagtcttccaatgttgtaatctcagagacagatcccatcttaatgattcgatagattttccggctcctgcagttcgaataattaaactcatttcttcaggtagttctaataacgtcaataactcttttaatgctatcctatcatttccttcaattcttcttgatataccaccagatttaggactattcggcatcagaactaaataacttccagctaaactaataaaagttgttaaagctgcacctttggttcctcgttcttctttactaatttgaacaataacttcttgaccttcttgtaaaacatttttgatattaaaacctaaagtttcaatatgattttctggaaaataatttttagaaatttcttttaacggcaaaaaaccatttttttcttcaccataatctacaaaagcagcttctaaactaggttctatacgagtaatctttcccttatatatatttgattttttttgttctgatccagaatgctctatatcaagatcatataaacgctgaccatcaacaagagctacgcgcaactcttcctgctgagttgcattaattaacattcttttcattatagctttttctcgcttatttttataaataagtaaacatataaacaggaaatataaactataaaaaattaattttttatgatcatattatgatttttatttaaaatacctataaaaataaatttttttacatttaaataaatttaaaaaatataaatatataataaattattatgtattaatacatgaaaaaattttaattttttatataaaaaaaatataaaattttagtatgatttatattaacaaaaaatttatttaatatatttatataaataattatattataataaataaaaattaaaaaaattaattaaaaatagagatttttttaatgacacataaaatactacctatatctattatatacattaataaagaaatgctgaatcaacgcatcgataatttcatgcgtagtaagtttaaaagtgtacctaaaagtatgatttatcgtattataagaacaggaaaaattcgaattaataaaaaaagaatcaaaccgcattataaattaaaaattggagatatactgaaaattccaccaataaaaattttatgcgatataaaaaatacattctttcccttgaatcattctacaaatttacttaatagaattttatatgaagatagtcatttattaattattaacaaaccttcaggaatagcagttcatggtggaagcggattaaattttggcgttatagaatatttccgaaaattacgtccgctaaataaatttcttgaacttgttcatcgtattgatcgtgatacatcaggtgttttaatattagcaaagaaacgtacatctttagtatcattgcacgaacagttaagagaaaaaaaaattaaaaaagaatatatagcattagttcatggattatggcctgatcatataaaaaaaatttcagaacctctattaaaaattcaatttaaaaacaaacaaaaaatggttttaatcgataaaaagggtaaaccatcagaaacttattttcaaattaaaaaaaaattttcttcttctacgttactatcaattattccaaaaactggtcgaacacatcaaattcgcgtgcatgctttacatgccggtcatccaatattttttgataaacgttatggtaaaaacgatctagatgctgatataaaaaataatcataaaattaataggcttttacttcattcttctggagttcattttatacatccaaaaaatggcaataaaatttatataaaagcaccgttagatatagattttcagaattatttaaatactataatatagtttattaaactattttttttaacatactaaacagagaaatataatatggcagttcaaaaaaataaacctactcgttctaaaagaggaatgagacgatctcatgactctttgacagcccctcatttatctatagataaattttctggagaaacacatatccgacaccatattactaataatggttattataaaggtaaaaaagttatttaaaaaaatatatttaataagaaatggtacttgaaaaaagtaccatttataaaatatataaatattaaatgaatcacactgatttaggaggtgttttataaaaaataaaaatttattttattaaatattttattagagtaacgtaattattttttaaaaatttatttttatatattttttaataaaaaaaatatatttaaataaaattaaaaagtaaaattttatataaaatatataaataataaatattattataaatattattataaatattttcaaactattttaaattttatacatgtttcatcttaacaaatttatatgataaaaaacattatttatataaaatacaattaagaaaaaattaaaaattattgaataattatattgttattctttttagtgttaaaggaggtaattataatgactttattttcaatgttatttccaggacaaggttgtcaatatataggtatgctatcttcatttttttacaaaaataacaagatttttttcaatacttttgaagaagcgtcagaacatatccaccttgatttatttaaattaatacaagaaggacctttattaaaattgaatcaaagcaaatatgcacaggtagcaatattgacttcatctgtttcaatctatcgtttatggaataataaaaatggaaaaaatccatcatttatgtcaggacatagccttggtgagtattctgctctagtatgttctgatgcaatccaattttctgatgcattaaaaattgtttttttgcgtggtcaactcatggaaaaaataactataaacagaccgactttaatgcaggcaattattggtatcgatgaaaaaaaagtacaaagtgtgtgttgtttattaaaatcaaaaaaaaaattgtttctttagctagtataaattctcataatcaaattgtgatttcaggagacgcatccgctgtatataaagctagtttaaaatgtaaaaaattaggtgctaaatatacatttaaactcaatgtcaacatacctgcacattctatattaatgaaaccaatatctcaaaaactaagaaaaatattaaaaacaatcactataaatccaccaaaaattccaattataaataatgttgatgtaaaatctgaaaatactagtaaaaatattaaaaatgcattaattagacaaatttatagtactgtaatgtggaaagatattatagaatttataaaaactaaaaaaaaatacgtaatgttagaaattggacctaataaaatactaactaatttaaataaaaaagataaaaatcttatttcatttagcaccaataattttaaaaattttttaatagcattcaaaaaaattaacaagggaaaaaatgaatatcaatagacaaaccgcatttataacaggggccaatcaaggtataggaaaagcaattgcaaaaaaattaataaaaaaaggaattcaagtaattggcacgtctactactgaagatggagtaaaaagaattaatgactatttggaggggaatggatttggttttgttttaaatttaaaaaacatagattctattacagaaaaaattcaagaaatttataaaaaaaaacactctattgatatactaattaataatgctggaataaaagaagataatttattagttaatatgaaaagcactgaatgggatgatgtaatcaaaactaatttatcatcagtatttcatcttgtaaaatctgttattcgatcaatgatcaaaaaaaggcaaggcagaattattaccattggttcagttatagcttatacaggtaacaaaggacaagtcaattatagtgcttcaaaatcaggactaattggatttcataaatcattagcactagaagtagcatcaaaaggtattactgttaatattgtctcacccggtttgattaaaacaaatttcactgaaaaattaaattcaatacaatatcaaaaatatttatctaatattccaatgaaaagattcggacaaaaagaagaagtagcagatgctgttatttttttagcttcaaaaaaagcatcatatattaccggacatacattacatgtaaatggcggcatgtatatgatataatccaaaaaattatgttaatattaaaatatacttttaaaataaaaataaattttaaacacttaatggaaatgacaatatgaaaaatattgaagaacgtataaaaaaaataatttttgaaaaactagatataaaacaagaaaagatttttaatgatgcatctttcatagatgatcttggcgcagattctcttgataccgtggaacttattatggctttagaagaagaatttgatattgaaatatcggatgaagaagcagaaaaaattaatacagtacaaaaatctattgattttatacaaaagaaaaatttaaaaaaataaataattatcaaaattttttaattttttataaacagaaatttaatataaattgcatgtaattaaaaaaataatgataaaaagtaaatttattgtaattgaaggtttagagggtgcgggtaaaacaaacgcatgtatatgtattaaaaatctattaaaaaaaaatagtattaaaaatgtactattagttcgtcaacctggtagcacacctattgctgaagatataagaagattaataaaaaaaaaatttaatgatgataatcttatcaaagaaactgagttattattaatgtatgcagcaagaatacaattagttgaaaaaaaaataaaacctgcattaaaaaatggaatatgggttatttcagatcgtcatgatttatcttctttagcttatcaaggtggaggtttaggtattccaaaaaaaataatctatcaattgcaatctttatttttaaataacttcattccagatttaactatttatttagacgtgtctccagaaattggtttggcaagagcattaaaaagaaatccattggatttaattgaaagtagatctttgtttttttttaaaaaaactagacgatgttatctagaaaagtcaaaattagataaaaaaactataataatcaatgctaatttaaatattaaaaaagtaactcaaaatattacaaaaaaaatgttaaattggctaaataaacaagttatatgaaactatatccttggttaataaaaccatacaataatattgtacaacaatatcaaaaaaagaaagctcatcatgcgatattaataaaaactccaagaggcataggggtatcattattaatttggtttattagtaagtggcttttgtgcttaaaacctataggattaaattcttgtgataaatgtcatggatgcaaattaatgtcagcaaataatcatccagattggcacaattttacgccggaaaaaaacaacctatttagtattgaaagcgtacgaataattaatgaaaaaatatttacatgctctcgacagggcggatccaaaattatttttttatcagatactggaaaattaacagaatctgcaattaatgcttttttaaaaacattagaagaaccacctagaaaaacttggttttttcttgtaaattacaaaaatttaaattcacactctacactcaatagtcgctgccttatatataaattatttatcccagaagaaaaaaaaagtttgtactggttaaaaaaagaaactgttaaaaaaaatagatcatgcttaacagcactgcgtattaatcaaggctctcctctatatgcaaaaaaatttattaatagcaacttatggatagataggataaatttttatgaatgtttgcatgattctttcaaaaaaaataatttattaaaaatattaccgttaataacagaaaaagatagccaagtaaaaatcgattggatatgttttttactatttgattctattaaattttattttaatgaaaatgacaatttaactaattctgatcaaatagaactcatccaatttttttcttataattataagaacactattttagatacaagtattcgtacttggttacattgtaaatatagattgtctaacatatctggtatcaattgtgaattactattatcagaacaattgcttatatgggaaaaaatattaaatttttcataaaaatttaatatttataaaaaaagagataaaattatgtttttaattgattcacattgtcatcttgatagattaaattataatttaccgctagaaaatatagaagatgtactaaaaaaatcttatcagaatcatgtaaaaaactttttaacagtttcaacctgtatcagcaatttttacaatataaaaaaattgtttaaaaaatataatacaattttttattcttgtggtgtacatcccttaaattgcaaaaaagagcttaatctttttcatacaatagaaaatttatctaatgaaataaaaaaattatcttgtattaaagatgtaatagcattaggtgaaactggtttagattattattattcatctgatactaaaaaaatacaacaagattttttcagagaacatatcagagtcgccattaagttaaaaaaaccaattatcgtacattcacgcaatgcttcagaggatactattaaaatactgcaagaagaaaatgcggaaaaatgcaaaggagtactacattcttttactggtgattataatactgcatgtaaattattagatctaggtttttatatttcctgttctggaattattacttttaagaattctttagaactttgcaaaaccataagaaaaataccactaaaccgtttattaatagaaacagattcaccatatttatcaccagctccctaccgaggaaaaggaaatcaacctgcatatttattttatatagcagaatatctttcgatattaaaagaaatagatatacatgcacttgggcacattacaacaagtaattttcgtacattatttaatatttagctcatttagtctttcatcctatatcaaatgaaaaaataatatatattacataccattcatttaaaatttttatatatacttaggagtgttttttgtatgtttaaaaacgtatttgcaaaccttcaaaaagttggtaaatcactcatgttgcccgtttcagtattacctattgcaggtatactgttaggaataggatctgctcattttaattttttaccagatattctttctcaaattatggctcaaacaggaggttctgtttttagtaatatgccattaatttttgcaattggtgtagctcttggctttactaataatgatggagtggccgcattagcagcagttgtatcttatgggattttaattcaaacattaactgcagtagaaccgattgttttacatacaactattgaagtcataaaaaataaacatctttctgataccggtatattaggaggaattattgccggcgcaatttcagcgtatatgtttaataaattttatcgtattcaattacctgaatacctaggtttttttgctgggaaaagatttgtacctattatttcaggattatctgcaatattaataggtgtgatattatctttaatttggcctccaattggtcatggaattcaaattttttcaaaatgggctgcttatcaaaatcctattcttgcttttgctctatatggactagtcgaaagagcactggttccatttggattacatcatatatggaatgttccatttcaaatgcaaattggagaatatactaactctataggacaagtatttcatggagatattgcaagatatatggcaggtgattctactgctgggaatctatcaggaggttttatttttaaaatgtatggtcttccgggtgctgcgctagcaatttggcatacgtctaaaaaagaaaataaaactaaaataggtagtattatgatttcagcggcattaacagcttttttaacaggaataacagagccaatcgagttttcatttatcattgttgcaccagtattatatgttattcatgctattttagcaggattatctttcccattatgtatttttttggatatgcgcgcaggaactagtttttctcatggttttatagattttatagtattaagtggaaacagtcatcatatattgctttttccaattattggtatactttatggattattatattatattttattttatttattcattattaattttaatttagatacaccaggacgagaaaatataaaaaacaatatattggaaaaagataataatgaaatcgcaccatatattattacagcattaggtggaaaaaataatattaagaatctagatgcatgtattactagattgcgtattacagtttcagatatttcaaaagttaaacaaaaggatttaaaaaatatcggggctgcaggaataataatttcaggatcaggaatacaagtagtttttggaacacgatctgaaaatattaaaaccgcaatggatgagtgtataaaaaatatatgaaaaaacaggaatttaaattatgcaagataattcaatttttaaaaatattattcaaagaaaaataccagcaaatattgtttatcaagataaaaaaatcactgcttttgaagatataaaaccaaaagcacctgtacatatattaattatacctaatttttttatttcatcatcaaatgatatcaataaaaaaaacaaatggattatgtcacatatgttttatattgccgtgaaaattgcaaaacaaaaaaaaataaatcaagaaggatatagaattattattaattgtaatgaatatggaggtcaggaaatcaattatctacacatgcatttattaggcggcaaaaaattaaaatctttctcctaatttttttatagaaaaaatttttatgaaaatttctttttttacattataaggataagatttgagaagaaatttgttattgatattatttattatattttttataaatagttgttcttattctaaaaatatagagaatactttttcgaaggtaaaaaaaacaaattttattcttttaaaatttgattctgctatagaaaagatcatttcggaaatgttaaaacctaatcatatattaatctttaataaaaaattattttttattgatttactagaaaatcaaactaatatttttatagacagggaaaaaattacagatttaataaaacacaaaatttccataaaaaataatgacattcattttcttgaaaaaaatatgattaaaaaaaataaaaaaaaaataggtattttagaaataaaaaaatcactagataccagtactgcaatttttttctctcgcaataacaatgtagaatattatatacacagctgtatttctggtaaaaatgaaccttttttattaaaaattgaattgatacttgttaaaacaggagaaatagtatttatgaaagaagagagatgctattgataaaaacggtatgtaaaaaaattatattttatatataaaaaatattaagactaattttgaaaataaaaaaagactttttgatgtgtctaagagtagttctttctaccgacgttcgtataattaaataattaattattctgaaatataataaatagatttctctattatatgtcagtagaaagttctaactcttagttgttttagaaaaaaagctaaattaattttaaaaaatatatattttcatgaaattagaaatgataaactattccagcaccaatggtgttatctgtaggaatgttttgctctttaataacattatcactctttaataaattaattgtataattcatatatgtagaaatatttttgttaaattcataacgagtagaaatattaatttgttttgctaattctaaatttttaggaacagtagtagcatcttttatatttaaattttgccccttagaatctaaataactcaaggaaggatgaaatccagaatgaaaattatattctgcaatcgcttcaatattttgagttttattgatatatggttgatccttagaagcattattatcgctaagaatatttaatgatggtgttaaattacgtccttcaccataaaatgctgctatatatatatcattagcatcatatttaaaacctaaaccatatgcacctacagaaggagttagcttgttgtcttgattacttttgtcagattgaaatctttgagaagaaaaacaagaaccaatggcagtaagtcccacatcagtttcatattttatagaaataccccaaccaggaccatttgtctgattttgcgctctattttcagattgatcttgatactgtaatataaaactcattccgtcaattaaaccaaaaatatcatcatttttataagtaagtaaactattgcttctacccgtcatatagttatcgttatacgaaaatatactatctttattaatatatggagaacgattagtcaacgcttgcacgtcatgtaaaacaccataattacgaccataatctattgatccccaattgccatacttgaaaccagcatatcctagacgtaaattgttaggttgctgtttatctaacaattgttctggtacagaaagatcaattccatattcaatagtcgcataactaaatagttcatcagcaatatttacctcccccgataaacctaaaatagcatttgtatcgtctttatgagatgtaattttatttgctaaaaaactatgatttaatttatgattaggattaatgctaccatataactcaagtttattaccatgtttgtgaaaaacttctaaagcattaactccattactagcagctaataacattgggattaccattgctaaagatttacgatttgtcataattttttatactaccttttagtaaaaataatttaaattaatatcagtttattaaaataaatattatttttttatattttgtatttatatctaaatacgaaaatacaaataattatttagtaaatgttaaattttttcattaaaaataagcgttattaacggtacgtggaaatggaatgagatctcgtatatttgttataccagtaaaataagaaatcagtcgttcaaaacccattccaaaacctgagtgtggaactgttccgtatcgacgcaaatcgcgataccaccaataatcctctttttttagccctaattctaataaacgttcatctaaaattgcaatacgttcctctctctgagaaccaccaattagttctccgacattaggcactaatatatctattgctgcaacagtttttttatcgttattcagtctcatataaaatgcttttaattcttttggatagttttttactattaccggaattttaaaataattttctacaagaaaacgttcatgttcagaagatagatctatacctaaaaaaacagagttattaaatttaatcttggaatcaagcaaaatatttatgacttctacataatctatacgtacaaaatctactaataaaaatttttctaaacgatcaactatattactattagtatagttttcaagaaaattaatatctgttatacatttttttaaaagagatttgcaaacatattttaacatacactcagcaaaatctgatatatcatttaagtctgtaaaagctgattctacttctagcatccaaaattccgctaaatgacgacccgtattagaattttcagcacgaaatgtagggccaaaagtatatactttagataaagaacaggcatatgtttctaaatttaactgtcccgaaacagttaaaaaagattcttttccaaaaaaatcttttttaaaatcaacggaactatctaaatttttaggaatgttttccatatctaatgttgaaacacgaaacatttctccagcaccttcagtattcaaactagttataataggagttggaacccagtaatatttttctttataaaaaaaatgatgtaatgagtgtaatatataatttcttattcgagctatcgcgcctattaaatttgttcgagatcgtaaatgtgctacttctctcagatattctgtgctatgttttttagaagatattggataagtctctgggttttcaacccaacccaaaactttaatttttttcaattgaatttcatatttttgtttatctccaattgatagtattaattttccactaagcatcacagaacacccagttgttaggtgtagtatttctttataataattaggcaaagtattatttgcaatcacttgtatagaattaaaacatgaaccatcataaattgtaataaaagaaaaaccagattttgaacttctacggttccgaacccatccacatacagtaattaaactatttactattatatcatctttatatatatctgatattgatactctattcataaaaccgttccttttatacttattttaaaaaatagattgttataaaaataatttttttaaaaaagtaaaagttttttattttaaaaaaaattatttgagcttgaaaaggttatttaattattaaaaataatataaaaaatttttagtttatctattttttaatgatacattaaatacttgacataaattttttaaaaaaattcgatctaaacaaaaggtttttcctggactatcagatattttagcaacaggtttaccattgcattctactaatttaatgacaatatttagcggttttacataaggaatatcacaagttaatttggtacctattccaaaaataacattaatttttttatgaaattttttatataaagatataatttttttaaaatctaagttgtcagaaaacaataatgtttttgtgcatggatctatacctaatttttcataatgtttaagagctttttcaccccatttcacaggatctcctgaatcatgtctaataccttggtaaaaagaagcaaaatgtaaattaaaatcatctaaaaatgcatccatagtgattgaatctgtaagagcaatacctagatgattcttgtattgatataaccatttttgtaatgctaaaatctgactattttttaaatttgatccaatttgttgatgtgcttgaaaccactcatgagcttgtgttcctactggttttatttttaatatacgagctatatggtaattgctagaaccaattaaaaagggaaaactttcttttaatcttttaacaatagaatattgcacatcataagaaaatcttcttcttgttccgaaatctacaatttttaaatgagataaatctatatatttagtacgattaaagaatttttttaatttaatatccaaatattgcaaagcagattgagaagtaatttctggagaaaaatttccatgaaaaacttcgctaattaaagctaaaataggtacttcccacaatattacttctttccataatccacttatacgaatatgtaatcgaccttgatagctattgatctttacttgcgaaacattataacgaaatttttttaaccaatgtaaatattcttttttaaaaaagggaaaagaggtcatataaacatattcttcatgacttaaagataaagatctcatcatactaatctgatctaataaaatatttgcatagcaacctaaaaagttatctcctctgcaaagaaattcagcaactacatttacatttttataatgataaaaaacagcttgttgcatatgcagtttatatgcatcagtatcaagcagtgtttttactattggataatcatatcgtttcatagtattctttatcttttttaatctacttttttaatataaaaaaactatataacatactatatcatcctagtgacgttatagaatataataatactattataaaatcttttataaaaatataacataaatagaaaagttatcaatttttcaaaaaaaaataatatctttaaaaaaagatagcacgtaaaataaaattattctcattttacatgtatagagttttttacaatattattgtatatgattttattctatatcaaaaaggaataacaatgttttattatttcattcgtaagctattatttttattagagcctgaaaaagctcattttctaaccttaaaatatctaaatattaaaaatatccagttttttgattttttttttataaaactatcatattatcaaaaaaaattaaatgtatgggtttaatcttcgataacaaactaggaacggcagcaggaatagataaaaacggagaatatatagatgctttatccaaactaggatttggttttattgaagtaggtactgttactcctttacctcaagttggaaatccaaaacctagaatgtttcgaatagtttctatggaaggaattattaatagaatgggatttaataatttaggaatagacaatctaattcgtaatataaaaaaatctaattttaaaggcataataggtgttaatattggaaaaaataaaagtactagtttagaaaattcagttgacgattatttaatatgtatagaaaaaatttattgttatgctggctatattgcaattaatatttcatcacctaatactacaaatttaagaaatttacaatatggaatactttttaagaaactattatataaaataaaaaaaaaacaaaaagaacttcataaaaaatatttaaaatacgttcctatagcaattaaaatctcaccggatctttcgataaaggaattagttgatatttcaaaacaattaattagatataaaatagatgcggtaattgcaactaatacgacgctagatcactcatcattatttggattaaagaatagttcagaacaaggcggtttaagcggattacctttacaaaagaaaagtaccaacactatctcaatcttatcaaaaagtttacaaaaaaaaattcctattattggagtcggtggaattaattctataaattcagctaaagaaaaaatagaatcaggagcgactttaatacaaatttattctggattggtatatcatgggccaaaattaattaaaaaaattattaatcatatataatatttttatttgcatattttcacattgactttctagtacagaatatttactaaatattattaaaaattttaaataaatataattatttaaactatttatattatatatataatatactcaatatattataaaaataatttttaattattaaaatactaatgataaaaaataaaaaatgaatgatttatttgcaagtacaaattttggtactgaaaaattactagaaaaagaactcttatctttaggagtatcagatataaaaataatcaagggaggaatatattataaatctaatgacttattattatataaaagtttaatgtggagtcgaattgcttcgcgtatttatttatgcataaaaatttttactattaataacatcgatgatctttatgatcacgtgtacagtattaattggactgaaatttttcatatccacaatacttttttagttaattttaaaggaactaataattttattcgtaatagtttatttggagctcttgtaaccaaagatgcaattattgaccaattccaaaataaatacgcttctcgtccaaatgtaaatcttattgaacccgatatccgaataaaacttgtactgttaaataacaatatcttgcatattatgctagatttgagtggcgaacctttaaataaaagaggatatcgtcaattctataacactactcctattaaagaaaatctagcaactgcaattgtattaagttcaggatggaatgagaatactcctatgatagatcctatgtgtggttcaggaacatttctcatcgaagcagcgatgatatcttctgatagagcacctggattaaaaagattaaaatgggggtttcaattttggaaaaaatataataaaaatttatggaaaaaagttttagaggaagcggaagaaaaatttaaaataggaataaaaaaatgttttcaaaattattttataggatacgattatgatcctgaaatcataaaaaaagctaaaaaaaatgcatcaaatgcaggtgttttaaaaataattcaatttttaacaaaagatgtgaataacttaaaaaatgtttatcataaagaacaagaaggaataatactaagtaaccccccatatggagaaagatatcaaactgaaaataaattagtaggtttatatgtacaattaggaataacagcaaaaaaatactttaaaaattggaaattatcaatatttagtgcatcaacatttttattggattttttgcaaatgcaatcacatgaaaaatatttttttaaaaacggtccgttaaattgtatccaaaaaaattttttaattttttttaaaaattctagtattacaacaaatgaatttaaagatagattaaacaaaaattttaaaaaattaaaaaaatggattaattcggaaaaactagaatcctttcgagtttatcatgcagatttaccgaattataatataatagtagatgtttatgataaatgggtggtaattcaagaatatcaagctccaaaatcaatagatcataataaagcatttaaaagattgtgtgatgctatttactatacaaaagaggtattatctatttctataaataatatcgtattaaaaactagaataaaaaacaaaaataaaacacagtataaaaaattatttaatagtaatgattttatcactattaaagaatatcatgcaaaatttttagtgaatttaacagattatgtagatactggattattttcagacaaacgactggtaagaaagctattaggagtattagctaaaggaaaagattttcttaatttattttcatatactggaaccgctactgtttatgctggattaggacacgcaaatagtacaacaagcgtagatatttctaatacttatataaaatggtcagcacgtaatatgtctcttaataatctaactagttctcagcataattttattcaatatgattgcttaaaatggattaaaaaaactaatcagaaatttgatcttatattcatcaatccgccaactttttcaaattctaaaaaaatgcaacaatcttttgatttaaaaagagactatcttgacgtaatgatacacttaaaaaaaattttacgtcatgatggcacaattattttttccagttctacacgaaattttgaaattaactttaattgcattaaaaaaatgcaattacatgcaaaaaaaattactaacaaaatacaatcgaaagatcatttaaaaaattcaaatatttaccattcgtggttaataaaacatataaagtaaattcaaggatagtaattttatgtctttaattaatattcataatgcctctttatcatttagtaatttgcaaatattagaaaaaagcacctttcatatcaacaaaaatgaacgagtctgtttaattggcaaaaatggagctggaaaatctactttattaaaaattattaataaaaaacaagatttagatgaaggtcagattatttataaaaaaaatacaacaacagcttatttagaacagaataaccctaaaaatcttaatatttctatatatgattttatcgctttaggattgaaagaacacgaaaaaaataaaaaaaaacacacaaacgaaattgtaaaaatagaaaaaataattgaattgattaaattaaataaaaacactttattatcccatctatctggaggtttattaagaaaagtcgcattaggtcgtgtattggtaagggaacctgatatactactacttgatgaacctacaaatcacttggatatgaaaacaattaaatggcttgaaacatttttaaaaaaattttctggtagtatactatttgtatcacacgatagaaattttattcaaaatgtatctacacgaattatagatcttgatcgtggaaaattagtttcttggccaggtgattatgaaaattttataaaattaaaaaatgaaagttatcgtattgaaaaaatacaaaaacaattatttgataaaaatttagaaaaggaagaacaatggattagaaaaggtatcaaagcacgttctactcgaaacgaaggcagagttaaaaaattaaaaatattgcaaaaagaacaaaaagattacaaaaaaatagaaaaaataaataatatcgaaattaatcaatcaaaaaattatttaggaaaaataatttttaagttagataatatagactttttagtaaataataaaattattattaaaaatttttcatcaattattcaacatggtgataaattagcattaattggtgataatggatgtgggaaaagtacattaattaaaatcattataggggaaaataaacctcaaaaaggaaaaatttatataggtaaaggattaaaaatatcatattttgatcaaaatagatcttttttaaatccaaataaatctattatagaaaatatagattatggaaaagaaaaaattttgttaaatagcagagaacaacatataataagatacttaaaaaattttcttttcaaacccaatcaattaaaatctttagtaaaaacattatcaggtggtgaatgtaataggttacttttagctcaattgtttttaaaaccaagtaatgttttaattcttgatgagcctacaaacgatttagacttagacactctgcaattgctagaaaaaattattattgcctataaaggtactgttattattgttagccatgataaaacattcattaaaaataccgcaaaaaaatgttggttttttgagaaaaatggatttatcaatactcatttcagtcaatatgattctttaaaaaaagaaaaaaataattttcataaagaaaaaatacaaaaaaataaatctaaaataaatcttgctattaaaataaaaaataatttcaaaaaagaactcaatgctattttatatgaaatagaaacaattgaacttgacattaagacattacaaaaaaaagtaaatgaacctgattttttcaaaaaaacgttagaagaaaaattaccaacacttaaaatgctagctcaaaaagaaagaaaattaggaaaaaaaatacttttttgggaaaaattagaaaaaaatattataaatactaaaatatagaatttaataagaaatttttttaagatcattatttaacatataaaatttgtattttttcatacattctaaagagcagcaactgtgaaatttaacagaacagttttcacattgaataaaaagaagatgacacgagctgtacttacagttaatataaacatcagaggatttcccacattgcttacaatatgatattacttcatctgaaattttctcactcattcgattatcaaaaacaaaacttttccctttaaacaaaacgggtaacccattttttcgagcatcgtgtacataaccaataatacctccttctaaatgataaacatgtttaaaaccattaaaaagcatccaagaagttgctttttcacaacgaatgccacctgtacaatacataacaatttttttatttttagcatatgccattaattgtattactttttttaattgttctcgaaaagtaatgcttttaatttctatcgcattctcaaaatgaccaatagcatattcataagaatttcgcatatcaatgaatattgtctttttatcatttaacatcgaattaacttgttctgattgaatgtaaatacccacattattagggttaaaaaaatgttctttaattccatcttgtacaattttttttttaattttaacacaaagaacccaaaaagatttctcattatctaatgatttattaatacgtaaattatttagctctatatcgaaattatataaaaatttttttaaaatagaataatattttttaggaacactaatttgagcgttgataccttcagatgctacataaattcggcctaaaacattatatttataaaaagttttataaagtctatcacgatattcttgagtgtttttaataaaaaaatatttatagaaagatagtgttaaacgaggttctgtttcaaaaaacatacgtctttttagttcttttttagaaacaatattatgtaaaattgacatttaaaaatcctataattattatattatcagaagaatatagaaaaaatatcatacagttactttttataagacatatttctaaatatttttatttgttcagataattttagatttatttcatttaattttaataatttatttttttcctgtgttactatttttgtaggagcataagataaaaaatctttatttaaaattttagttttaattttaaatatgttaagttctgtttttttttgctcttttactaatctttttaattccactttagtatctactaattttaatataggtattataatttcggcaccatctattatttcttttatacataagtctttatcatatttttcagaaagtattgtaatcttatctaaaaacgatatattttttattaatgaaatattttctttgataactttttcttgttcagaattgatattatataaaaataatggtaataattttgttgaactaacattcatattagttctaatatttctcagaaatacaattatttttttcatccaattcatttgaactaatatttttttatcaaataatttatgattatactctggaaaatcttgcaacataatagtcttttctgaaatattttgaattaattttatgcgttgccaaattgtttcagttataaaaggcatgataggatgagctaattttaagagcaactctaaaacatacactaaaacatttttagtacaatatacttctttagaagagcctaatttaatgactattttaacaaattctaaataccaatcacaaaatatattccaaataaaatcatataaaatattagcagcaatatcaaaacgataagtatctaatgattcacgatacaattttactgtgttattaaattctattaaaatccatttatttattaataacatctttcttttaacatcaaattttgaaaaattatgatcttgtgtattaattaaaacaaatcgactagcattccaaagtttattacaaaagttacgatatccttttaatcgattcatatcccattgtatatcgcgtgtactagatgccaatgcagagaaagtaaaccgtaatgcatctgtgccagtagatttaatgccttctggaaattgtttaatagtacgttgaattattttatcagacaaatttggttgtaataaattattcgttctttttttaattaattcacttaaagaaattccatctatcatatctaaggggtcaattacatttccttttgatttggacattttttttccaaattcatctcgaattaatcctgttatataaatatttttaaaaggaacttcaggattattatgtttatctttcataaaatacattgtcaacataatcattctagcaatccaaaagaaaataatatcgaaaccacttactaaaacattagtaggatgaaaagtctttaaaaatgtagttttctttggccatcctaatgaagaaaaagtccataatccagaagaaaaccaagtatctaatacatcattttcttgttttaataagacattctctgatatcgaataagcttgacgtatttctttttcattttgaccaatataaatatttttctgatcatcataccatactggaatacggtgaccccaccataactgtcgagaaatacaccaatcttcaatattattcatccaagatgaatacatactttcatattgttgtggtataaatttaatttttttatcttttacggcatttaaagctactttagctaaagttgatgtttttaaataccattgatttgtaagcatcggttctataataacaccgcttctctcgctataagggacagtaacattacattcttcaattttttccaaaaatcctaattttgtaatttctttaataatttcaattcgtgcagacaaaatatctaaatgttgaaattgcattggaatgcatgtactatattgattagatttttcacctttatagttataaacttcggccgtagatttgatacgcccatcaaaagtaaaaatattaatcattggtaatttatgatgtaatccgactttataatcattaaaatcatgtgcaggagtaatttttacacaaccagttcctttttctaaatcagcatatctatctttaattataggaataattctattagttaaaggacaggaaacatgatttccaataaattgattatatttataatcttcaggatttacagcaatagctgtatcacctaataaagtctcgggtctagtagttgaaactattaaatattttactttacttcttaaggacatatcattttcaataattggataacgaataaaccatttttttccttttattaaacgatgctcaacttctaaatctgaaataacagtttctaattttgagtcccaatgtactaatttttttttctggtaaattaaattatttttatataatataataaaagcttctctaacagaattagaaatatcaggatctaaagtaaatttttcgtaatcccaatctactgatattcctagacgtcgcatttgttttgtaataatattacttgattgttttttccattcccaaattttcttaataaaatcatctctgctataatcttttttagtcttctgttctttttcaaaaatttgacgttcaactaaaatttgtgttgctattccagcatgatctgttcctacttgccaaaatgtgttttttccctgcattctatgataacgaatcaatatatccataatggtttgttgaaatgcatgtcccatatgcaagcttcctgtaatattaggaggaggcatcataatacaaaaagttgatttttctaaatgattaggtttaaaaaacccatttttttcccaaaaaaaatataaagattcttcgatatgtttaggattataaattttttccattttatttaactattttaataaaaaaggcgatattgccatgtaatgatgatagtatctcagttgaaaatatatttttttaattataaatataattagactgatttaataaaaattgacataataattcaacaggacgtcctgttgcacctgatttttttcctgatttccatgccgttccagcaatatctaaatgtgcccaattatactttttagtaaatttagaaagaaaacaagctgcagttatagctcctgctttccctcgtcctatattagagaaatctgcaatatcagaatttaattctttatgatattctgaaaataatggtaaactccatattttatcatctgtttcctgcgatgcatggagtaattgatttgataactcttcattattactaaagagtccacttaccgattcccctaatgctgtaacacaagctccagttaatgtcgcgacgtcaatgactatatcaggagaaaaacgttctaaatatgttaatgagtcacataaaactagacgtccttcagcatcagtatttaatatttctactgtttgacctgacatagtagttaaaacatctccaggtctaaaagaatgactacctaccatgttttcacaaccagataaaattccaattactgttaaaggtaattgtaactcagcagccataattaaagttccgtatactgctgcagcaccacacatgtcatacttcatttcatgcatatgaagagctggtttgatagatattcctccagaatcgaaagtcaaaccttttccgacaaaagcgataatttttttatttacaatattattgccagaatattttattacagacatgaatggtttattttttgatccatttcctactgctatataagcattcatacctaattctttcattttttttatatcaataatttccacaacaatattattttcatattttttagaaagttcttgagctttataagataaatacagaggattacagatattaggtggtaaattgcttaagttttttgtagatgtaattgcatggtcaatagctagtgcgtgttttaatgctgtttttgctataaataaatcatttttttttattatatttaatgtaatagaatgtatattagtattttttatatttatattatttattttaattgtttcatataatgattcttttaaagaaagaaccattcttctaatcatccaatatatattatcaatattaatgttagaaaaagaataaacaatatttgttatagattttttttttattgcgtgtatagtattttttaagatttttttaaaacgtattatgttgatttcatctttttttccacatcctacaagtaatattctttttgaaagtatcttaggaactttatacaacataagtgtatctcctatttttccttgaatatcacctagtttaattaaagaagttatatgaccgttgctacatttatctaaataaatggccgaatcggaaagttcagatagttcgaaaacagaaactactatacaatcagttttttctttatctaagaaacaactttttataaaaaaattcatgattatttctctatgtttaaataagatgaattaattaaattatcaagataataaaaacatctctaggttaatatctttatataaaattgatactattaattttattatattcctatatagtataaatttttttaatcattatttaattaataaatatgattcttttaaattttattaaaaatattatatactataaaactaatcctgctttaattgcaatttttaaaaatatatttttatctaatgatgagacgttaatatgaataatctttatcaacgtgattgtttaagactattagattttacttctttagaattacaaaatataattacactggctcaaaagctaaaacaatataaaaaaaacaataaagaaattcaactactcaaaaaaaaaaatattgctttaatttttgaaaaagaatccactcgtacaagatgctcatttgaagtagctgcatttgatcaaggagctcatgtcacgtatcttggacctggtagtacacatcttggaacaaaagagtctatagaagatactgctaaaatactcggacgtttatatgacggtattcaatatcgaggacaccatcatagtacaatagaaattttagctaaaaattcaaaagtgccagtttggaatggtttgactgaaaaatttcaccctacacaattgcttgctgatttactaactataaaagaaatttttccagaaagaaaattttatgaaataaaatgtgcttatgttggagatgcacataataatatgggcaatagtttattagaagctgcgtcattagttggattagatttacgtttagtagctcctaaagaatgttggcccgaaaaaaatatatttaaattttgtaaagaacaaatgaaaaataaaaaagggaatataatatgtactgaaaacattaacgaaggagtaaaaaatgtagattttatatacactgatgtctgggtatctatgggagaatctcaagaagtatggaaaaaaagaattgaattattgagctcttatcaagtaaatagtttaatgttaaaaataactaataatccacaagtaaaagtattgcattgccttcctgctttacatgatcaaaaaacttgtacagttaaatctatattaaaaaaatatggttttaaaaatggaatggaaataacagatgaagtttttcaaaaaaaccaaaaaattattttcgaacaagcagaaaatagattgcatactattaaagctattcttgtatctagtttattaaaaactattaaattttaaaaaataattatagtgaacaatataaatgcctttaacatactcaatattttttaatttctttatactgttgaaaaacatttcaaacaatcttttcttcaacaatcaaggaaaataaattttgagaaattctctatataaaaaaaatattatttcaattaatgatcttcaacgcaatgaattagaattagttttaaataaatctgcaatgctaaagaaaacaccacaacctaatttattaaaaaataaagttattgccagttgtttttttgaggcatccactcgcactcgtttgtcatttgaaactgcaatttatcgattaggggcttcgatagtagggttttctgatgggaataatatttctttagaaaaaaaaggagaaacattaacagacactatttcagtgattagttcttatgtagatgcaattattattcgacatcctcaagaaggatctgcacgtttagctgcagaattttctaataaaaaaccaatatttaatgcaggagatggagcaaatcaacatcctacacaaacactattagatttatttactatacaagaaacacaaaatagattaactcaattaaatatagctatagtcggagaccttaaatatggaagaacagtacattcattaacacaagcattagctaaatttaaacacaataaattttattttatttcacctgatgctttaaaaatgccaaattatattaacaatatgcttgataaaaaagaaatttactggaaaagacataataatattgaagaaataatttcagaaatagatattctttatatgactcgtattcaaaaagaacgtctcgattctactgaatatgccaatgcaaaatcaaaatttgtattgcgtgctgctattttaaaaaatgcacgtaataatatgaagatattacatcctttacctcgtatagatgaaatagatcgtgatgttgactataccccttatgcttggtattttaaacaagcagcaaatggtatttatgcacgtcaagcaattttatctttagtactaatagaaaaacatttataatgaaaatatggaaataaataaactccaagtagaagctatcaaatctggcagtgtaattgatcatattcctgaatatatcggttttaaattactatctttatttagatttaccgagacagaaaaacgtattactataggtttaaatcttccgtctaaaaaattagggagaaaagatattataaagattgaaaatacttttcttagtgacgaacaaattaatcaattagctatttatgcaccgcatgctactgttaattatataaacgaatacaatctagtaagaaaagtttttccaactttgcctgaaacaattgatagaattttaatttgtccaaatagtaattgtgttactaatcatcatcttattaattctagttttattcttaaagaagaccaattttttaatatgaatttgaaatgcaaatattgtgaaaaagaattttataagaaaatagttttgtcttgtcaataaaaaaaaaattaatataatctattcaatacatgagcgatatactccatgaatcatataattgaaactaaagatgctcctaaacctattggaccttattcacaagctttaaaaattgataattttattatattatctggacaaataccgatcgatgtcatatccaaccaaatacctgaaaatattgctgaacaaacttaccttgtattaaaaaatattaaattaatcttagttcatgctaagtttcaagtacacaatattataaaaactactgtttttactactgatttgaaaaaaattaatattattaatgaaatttataaaaaattttttatagataataagtcaaactttcctgctcgatcatgtgtagaagttcaaaaattacctaaaaatgtaaaaatagaaattgaagcaatggcgtttaaaaaataattttttaatcataatttatttattaaaatatttaaaaaagaataaatacacttagtatgccgcaaagcggcataaaaaatacaaaattaaacatttctacgacgaaaaaaagatgacttaaattcagtttttttaggagagttagatttattgaaactaccatcagaaacacgacggttactatttttatctttgttaaaaatagaacgatgagttgtcttattttcataatgtcttgaatctcgtaataatttcatattaattggtttatttaatattctagtacgattaaaggtttgtaataaatctttagacattcccttaggcaattcaattgtcgaataagaagaaaaaagtttaatattaccaatattacgactattaatatttccttcattagcaattgctccaactatatgacgtacttcaactccatcattacgacctacttcaatacgatataactctgcgtctttattgatatcacgacgatcgcgacgggttcgactgtttcggttgtcttcgcgtcgacgatcgtcttggaacaataaatcacgagactgacgtttaattacatcaggtttaataattaaaggacgttctccttgagccatttttaacaaagcggctgctaaagtttttatatctaaatcatctgtagagtataatttatctaataaagcactatattcatctaaatctcggctttctaattgttgttgtactttttttgcgaattgttcaagacgtctttgacataataattctactttaggtaattgtacttcgggaatagattgtttcatagtacgttcaatattacgtagcaaacgacgttcacgattttcaacaaataataacgctcgacctgctcgacctgctcgacctgttcgacctatacgatgaacataagattctgagtccataggaatatcataattaataacaaaacttatacgatcaacatctaaaccacgcgccgcaacatctgtagcaattaaaatatctaatctaccattttttaatctttcgagagtttgttcacgcaatgcttgattcatatctccatttaacgcggcactattatatccattacgttctaatgcttcagatacttctaaagttgcatttttagttcttacaaaaatgattgtagcagaaaaatcttcggcttctaaaaaacgaattaatgcatcagtttttcgaccatataccatccaataactttgtttgatatcaggacgtgtagtaatattggactgtatttttatttcttttggatttctcatgaatcgtttagaaatacgacgaattgcttctggcatagtagctgaaaataatgcagtttgatgttccttcggaatttgagccataattgtctctacatcttcaataaaacccatacgtaacatctcatctgcttcatctaaaactaatccatgtaaattagaaagattaagtgtccctctttttaaatgatctaataatctacctggagttcctacaacaatttgaggtccttgtcgtagtgcacgtaattggagttcgtatctttgaccaccatacaaaggtaacacatgaattccaatcatgtatttagaaaaatctgaaaatgcttctgctacttggacggctaattctcttgtaggagctaatactaatatttgaggagcttttaaattaatattaagattgtgtaatagcggtaatgaaaaagcagccgttttgccacttccagtttgtgccattcctaatacatcacgtccttctaaaagcaagggaatacaagatgcttgaataggggaaggtttaacatatcccatttcatttaaagattgaataataaaaggatttaaaccaagaaaagaaaatgtgctttcaatatgagtcatgcagtagatatgccttttaagttacaacggccagtctacatagctcatgatgaaaatatttatttattctcattgaaaagtatgaaccggcgtaaattaaatgatctaaaaaataaaataattgaatttttaagaatcaacaatagtatttattagttattgctaatgattttttaaatattaaaaatctaaaaaaacaacattagcaacttattgaagtttatttttttaaaaattatatatttatgttatataataattatattaaaataaaatgaattaatttttatattttttctatttatatagatatttttaaaaagatataaatgtatattttatcaaaaaaacataaatgatatcaaattaaattaattatatcagataatagaattatttattgatttattagaaagaatagaactgtctatttctttaatacttaatcttaaacgaccttgacggtctatttccagtacttttacagatattatttgatcaatttttaaatgattagatactttatctactcttttatcagaaatttgtgaaatatgtactaaaccttcttttcccaaaccaatcgaaacaaaagcaccaaaatcaacaatacgagtgacttttccagaataaatacgacctacttcaatttcagctgttatttctttaattctacgaatagcattttttgctttttctttaactgtagatgatatttttactgtaccgtcatcttcaatttcaataattgttccagtttcttcagttaacatgcgaataacagaaccacctttgcctataacatccttaattttttcaggatttatttttatgatgtgaatacggggtgcaaattcagagatttcacttctagactcatttaatgcttggttcattacgtttaaaatatgaagtctagctaatcttgcctcatttaaagctgaatgtataatttcattagtaataccctctatcttcatatccatctgtaatgctgtaatcccttcttctgtaccagcaactttaaaatccatgtctcctaaatgatcttcatctcctaaaatatctgaaagcaatacgtgttgatttccttctttaactaaacccatcgaaattccagcaacagcagatttaatcggtaccccagcatccattaaagctaaagaagcaccacaaacagaagccatagaagaagagccgttagattcagtaatttcagatactactctgatagtataaggaaaattctctaatgtcggcatgacggctaaaagacttctcttagcaagacgaccatgaccaatctctcgtcttttaggggatccaaccattcctatttccccaacagaataaggaggaaaattgtaatgaaataaaaaattatctattctgtctcctaataattcatctaaattttgtgcatctcgagatgtacctaaagttacagaaactaaggattgtgtttctcctctagtaaacaaagcggaaccatgtgttctaggtaaaataccagtacgaacatctaatgcacgaatcatatctttttctcgtccatcaatacgtgtttggttgcttaatatacgtttacgcacaacttttttctcaattttttgaaaaatatcttctatttctagcgtatctatgtttgaattttcatctaaaaataatttaattatattttccttaatactatttaatttttcaattctatcttgtttgttaaaaatgacgtaagcatcacttatatttttttcaaatgaattgataatttttaattctaatgttttgtttgtttctgggtaagatataacccaaggaagcttgctcgcttcatttgatagagaacgaatattattaattaccacttgttgttgctgatgtccgaatataatagctccgagaattttttcctcgctaagtattttagattcagcttcaaccataagaattgcattttgagtgcccgatacgactaaatctaacgaactatttttcatatcatcactaataggatttaaaatatattgattattgatataacctactctagctgcacctactggtccataaaatggaatccccgataaactaagagccgcagatgcgcctatgatggaaattatatcaggattaatctgggggttaactgatactactgtagcaattatttgaatttcattaagaaattttttcgggaataacggtcgaaggggtcgatctattaatcgagcagttaatatttcattttcactagggcgtccttcccttctaaaaaaaccgccaggtatccgacccgcagcatatgtacgttcttgataattaacagtaagtggaaaaaatttctgtcctgtgtgtatttttttttgtccaacaacagttacaaaaactgcagtttcatccatactagccataacagcagcgttagcctgtcgagctattacacccgtttctaaagtgattgtatgttgaccgtattgaaatttgcgtacaattggatttagcaaaataatatccttaacatgaaactaattttttaataaaaatatactatattattgaatttttttttatcataaataaaaaaataggtttttaatttacaaaatcgaaataaaatcgtaaaaaaagggctaataaagccctttgaaaaatttattttttattttatgaaaatattttaattttatgatttttataaaaacttcttatcgtcttaaatgtagatcttcaattaaggcactataacgagatatattctttttctttaaataatctaataatttacgacgttttgataccatatttaaaagacctctacgactacaatgatcttttttatgttgagaaaaatgtatttgaaggtaattaatttgatttgtcaacaatacaacttgtacttctgttattccactattttgttctgatttaccatattttaaaataatttttttagtatctattgcagataaagacatgtagtagtactccaatatattaaaaactgtattaaattacttccaaattaatcaggttattttaaaataatatcatgctaatcttaaatttaatagtgaataacttaattaatagatctagaaactaatctatatggaatcaataattcttctgtattaattcttcctaatccaataaatttattattttctaatgctattacacgtactagactatttttgatatcagaaaaaaaaattacagtttgtcctaattgaaaattatatgattgttgaggaaaaagatatactttaggtaaaaaagatacagggctatctataggcattaataaattatctattttttcgaagaaattaaaattattgtttttttcttttcttaataatttatgtaaatatgaaattgtgactagttgactatgaagatatgaagccatttctaaacgacgtaaaaaaatcacatgagctccacaacctaatttttcccctaaatcctccactaatgtgcgaacatatgttccttttgaacaaaatattttaaattcgattaagtttttttcttgatgaatagaacttatatcatgtataagaacttttcttatactacgcttaatatttaatccttgacgtgcatatttatacaagggcacaccattatgtttgattgcagaatacattggaggaatttgttcaatcaaaccagttaactccttgagagcagattttattttaaaagaattaattaaaatagggcgtttttttatgataattccatcagaatcagatgtagatgttttttcccctaatttagcaataacatgatattttttattagattccattaaataatgagaaaattttgaacattctccaaaacaaattggtagcatacctgttgctaacggatctagagtaccaatataacctgctttttttgcactaaaaagcatcttaactttttgtaaggcattattagaagatattccctgtggtttatctagtaaaagtaatccatgaacatcgcgttttttatgaaaaaacatctattttcctttattttattgataaaaaaaagtattcttattctttttttgtcaaattttctaaaatacaagaaattttattaccttttaaaaaagaatcatcatgatgaaaaataatatttggaacgattcgtaatttcattcttttacataataactttcggatataactagaagctctatttaatatagttatttttttttttaccttctcattattatcactttctaaaaaactaacaaatatttgtgcataagataaatcttttgaaacttgtacttcagaaactgttataattgttttaatacgtggatctttaagtgaatgctgtataattgcagctatttttttttgcaattcttgagcaatacgatcagagcgattgaataatttttccataattatactacccaattaaatatcttataaaatatacattatggtttataatattctcttcatttctctaacttcaaaaacctcaataatatctccaacacgtatatcattgtaattttttataccaattccacactctaatccattacgtatttcattcacatcctctttaaaacgacgcaacgattccaattcgccttcatatattacgatgttatttcttaatatatgaattggattgctgcgcttaattactccttctgtaaccatgcaaccagcaattaaaccaaatttaggagatttaaatgtatttcttacttcagctaaaccaataatattttctttgtattcgggtgataatagacccgtcatggctgctttaacttcatcgagtaaatcataaataactgaataatatcgcagatctaaatgttctgaattaattatttttttagcagaagtatctgcacgaacattaaatcctaaaataatagcattagacgctagtgctaaagaagcatctgtttctgtaatacctccaattcctaatcctattatttttatttttacttcttcagtagataattttaataaagctccagaaatcgcttctaaagaaccttgtatatcagattttagaataatttttaattcggaaacattatttttatttatgtcatcaaacatattttctaaatttattctgttttggtttgataattttttttcacgagacttttctttacgataagaagctacttctcttgcttttttctcatcacgaaccacagtaactacatcaccagaaaagggtactttagataaccctaaaacttctactggaatagatggacctgcactgaaaacttcatttccactagcatcacgtaaagatttaatacgaccatattcaaatccacacaatattacatctcctttttttagctgtccttttttcactaatactgtagctattggacctcgtcctttatctaaaaaagactctacaacaataccttcagccattccagtagttactgcttttaattctaacatttctgcttgtagtaaaattacgtttaataatttattaatcccttttcctgtttttgcagaaacggatacgaaaatattctcaccaccccattcttctgaaagaatgttatatttcatcaagtcgtttcttactttatcaatatcagaatcggttttatcaattttattaatagcaactattacaggaacattagcttcttttgcgtgttggatagcctcaattgtttgtggcattaccccgtcatctgcagcaacaactaaaataacaatatcagttatctgaactccacgagatctcattgcagtaaatgctgagtgtccgggtgtgtctaaaaaggtaatggaacctaaatcagtttttacatgataggcaccaatgttttgtgtaattccacctgcttcgtaaaatgcggtttttgttgaacgaatataatctaataaagatgtttttccatgatcaacatgtcccattatagtaacgactggagctctaatagcagaaacatcgtttcctgtgtcacgatctttcataattagttcttctaatgcattttcacgatgtacaataactttatgacccatttcttctgcaattaactgagctgtatcttggtcaagaacatgattaatagttccaataatacccatgttcatcatatttttaatgacttcggaactttttatagccattttatttgctaaatcggacacagtaatcgtattacttatgataacatctctattaattatagattctggtttttgaaaaacttgttgtaataaaataggtttatttttttgtttactatttttcttattacgattaaaagtacgaatttcttctttattatatcttccattatgaaaatttttattattcttcttttgacgataattttttaaaattcgcccatgatttcttttatctatttctacttctctatcattctcatcttcggcctgacgtgcgtgtaaaaatgttgttaaatgataatcttgtttttcttctttatgagatatccgaatatctttgttttctttaattctttttttgtggtttaaatcaaaagaattagattctctatgttgattgaattttttattttgttcatctttatttgaaatttttagtttgttttctttttttgtatttaaagatcttgaatcacttttatttaactctattttttctatattttttatgtattttttttctttattctttaaagatgacgttttctgcattgaatgtttaattacttttttttcatttaaaaaagattcattttcaaatttattgttttttacataagctcttttttttctaacttctacttgtacagatttgttttttcctccaaccgttgaaattcttaaagtactgcgtgtttttctttgtaaaactaaagtatctaaagagtatttttttttagattctaaatgtttcaataaaatatttttttcaagtacattaatataattgtcttcagtttttgttataccgataatagataattcttttattaattcttgaattgatatctttatttcattagataaaacttttaaacttatatctggcatactattcttcctatttatcagactttactactaaaccaacagatattacgagcagtcataattaataacccagcttgttcagaatttaaatttttaatatcagttaaatcgtcaattccttgatcagctaattcttctatagtaaatatatttttttcggctaattgcaaagctagtactgcgttcattccatttatttttaataactctttttctgtttttctttcttgtattatcattttatttttatctgattccattaagagaagtttacttttcgcgccttcacgtactttttttgcttgatcttcagttaaatttttaacttctagtaattcgttaaatggtatgtatgccaactcttcaagagaagaaaaaccttctttaactaaaattttaataatattttcatttatatttaaattttttttaaaaaaattaaaagcagtatgagcttcttctttatgtttagaatgaagatcttctgtagtcataacatttaattcccaaccactaatttgagaagctaaacgaacattttgaccatttcgaccaatggcttgagctaaattatttatatctactgctatatccatagtatgacaatcctcatctacaacaatagaagctacatcagccggagccatagcatttataacgaattgagctggattatcatcccataaaataatatcaatacgctctccacataattcgctagataccgcttgtacccgagcacctctcatacccacacaagctcctacaggatcaatacgcttatcattagtcttaactgcaattttagcacgagaacctgggtctcgtgcagcagcttttatttcgattacttcttctccaatctcagggacttctattcgaaacaattcagtaagcatttcagtttttgaacgacttataaatagctgagcaccacgagcttctggatacaccccatataaaataccacgaatacgatctcctggacgaaagttttctcttggcagcatgccttcacgtaaaattaatgcttcagcattattacctagatctaacattatgttgtctcgattaatttttttaactattccggtaattatttgaccggtatatttgcgaaattgttccactaacattgctcgttctgcttcacgaactttttgaacaatcacttgttttgcagtttgagttgttattctatcaaaatcaacagattcaatttgttcttctatataatcattaagataaactttttcgccatcaaaacatgctgcttctaaagtgatttctctagttggttgagttactgtttctactaccatccaacgtcgaaaagtagtgaagcccccagtttttcgattaatacttactctgatatcaatttcttgttcatgttttttcttagtcgccgttgctaatgccatttctaaagcttcaaaaattttttcgcgaggtagagatttttcattagaaacagcctcgacaacagctaagatttctttattcatcttatggaacctcaaaataaaaatttttaaaatgaataattacaactcattttttacatgtattaattgaaaaaaaaattaattatgaaattagataattaatacactaatttttattaatcaagagtttgtataattaattattacttaatatttaaagatcaattaaactatattatttagaagaaacattgtaataaaaaaccccgaaaagtcggggttttaggtgctattaccctatgtataaagttattattaataattttttatctctgaaatatagaaaaatattattacttttaaatgtagtacaatcatgaaaaaatcatttaataatactttggtaccgagaatgggactcgaacccacacgcctattcggcactaccccctcaagatagcgtgtctaccaattccaccacctcggcaaaaatgtattataattacatattttttatattaaatgaaaataattaattaggtatatcgagatttaatttttttttatctaaaacatgtttttttgttatggtgttgttttgattatcttcccaaaaaaaatccgaatcaattcttttactattaatattacacaaaataatacttatcaataaaaagaaaaaagcaagaattttaataattttagtaataaaattattagttcctatactattaaaaaatttaatattatttttcgtatgtgaatgaactgtattattcagtccttttcccggttgaagtaaaataaaaaaaattaaagaaaaggaaataaaaataaaaacaatcaaaaaaaataaatacataaagagttatttcctttgttaaaaaaaataattattaaaatatattactgtttacttaaatatgcttttttattaaaaaaaatttttattttttataaagaatttatatataagattttacatataaattatctattttttaaatgatattgcttgtctattctataaaatatatatttttctattttatactctgaataaataaataaatgataatttcccaaaatttatcacaactattatttttatgaaatatataaattaaagtaatttaatagtttttccaatatattgagctaattcataaacttttaaataatcttcaccttctaccataattctaatacatggttctgtaccagatcgtcgtactaaaacacgactattttgacctaaaatatttttatattgagtgagaatattttgtatttttatatctttttcaaaatctttatcttgttttaaaaaaatattaagaaaaacttgaggaaaaagttttatttgatttgataaatcatataaagtcatatgattattaatcatagttaacaaaacttgtaaactagctataattccatcaccagtagaatgcttatctaacaaaacaatatgtcctgatttttctgctcctagtatccactttttttctttaattttttcgtatacatttcgatcccctatttgtgcgggacaaaaaggaattccaagtttttttaaacctagaattacacccatattagtcattgaagtacctacaacaccaccttttaatttattttcttttaaatattcttttgcaataatataaattatttgatctccatctacttgatttcctaaatgatctaccataatgacacgatctccatctccatcaaatgctaaaccaagatcagctgattctgataaaactattttttttaacatcaagatattagtagatcctgaattttgatttatattaactccattaggattaatagcaacagtgattacccttgctcctaaatcttcaaaaattttaggtgctatcttaaaagttgcaccattagcgcaatctaaaataatagtaaattttgataaatttaaatcttttggaaaattttttttgcaaaagtcaatatacagactttcaggatctaaaatattattagaatgaccaaaatttacataatcaggatataaaaaagtatgttgtactttttgctcaatagaaaactctatttctttagttaatttaaccccatttttatagaagatttttattccattgtcataaaaaggattgtgggaacccgaaataacaattccagcagaagcatttaaagatttagtaaaataagagatggctgatgtgggcatacaaccagctagtaaagtagatactcctgtagacaaaataccaaattctaaaatagactgtaacatggttccagaaatacgagtatctcttccaataataattttttgtgttttatttttacctaaaactattccaatagaccatcctaattttaataaaaaatcaggtgttattggatttactcctacttttccacgtataccatctgttttaaaatattgcaaaaaagtcataatgatttcattcctgtattattggaaaataattatattttgcaataaatattatttttttagaaaataagatgaagttatagtaattttatcacttcatcttattttaagatacattaaataaaggaatgttgaatattataagattagtatttttttaaaataaaatttctataaaatacataaaaaaaaatatttatatttcttaattaaaagaaattatttatttgtatctgtctcaatccatccctttggttgtcgtacttctcttcttttcattaaatcatcaatttgaaatgcatcaatagtctcatattttattaatgcttctttcatagcatgtaatatatcaatattttcatttaaaatatttcgagccctgctataatttatttcaattaacaactttacttcttcatcaatgattctagccgtttcgtcagacatatgttttgccttagcaaccgaacgtcctaaaaatatttctccttcttcttcagcgtacaataaaggtcctaatttttctgaaaaaccccattgagttaccatatttttcgctaagcttgtagctattttaatatcattataagcaccagtagaaacatttttagcaccataaataatctcttctgctaaacgtccaccatataaagtagatatttgactttctaatttttgacgactaatactaagagtatcggattctggtaaaaaaaatgtaacaccaagtgctcgtcctctaggaatgatagttactttatgtgcaggatcatgatcaggaaccagtcttccaataatcacatggccagcttcatgatatgccgtagattctttttgaaaatcactcattaccatagatcttcgttcagaacccatcatcattttatcttttgctctttcaaattccaacatagaaactacacgtttatcaagtctagccgcaaaaagagctgcttcgttaactaaatttgctaaatcagcacctgaaaaacctggcgtacctcgtgcaataatcataggatctacatctttagataaaggcactttcctcatatgtacttttaaaatttgttctcttccacgaatatctggtaatgcgacaataacttgacgatcaaaacgaccaggtcgtaagagtgcaggatctaaaacatcaggtctattagtcgcagctattaaaataataccttcgtttccatcaaaaccgtccatttctactagcatttgattaagtgtttgttctctttcatcatgtcctccacctaatccagcacctctttgacgtcctactgcatcaatttcatcaataaaaattatacaaggtgcagattttcttgaatgttcaaacatatctctcactcttgaagcacctactccaacaaacatttcaacaaaatcagatccagaaatcgtaaaaaaaggaactttagcttctccagctattgcttttgccaataatgtttttcccgtaccgggtggtccaaccattaatatacccttgggaatctttcctcctaatttttgaaaacgactaggttctttaagatattccactaattcactaacttcctcttttgcctcatcacatccagcaacgtctgcaaaagtagtttgaatttgatcttctgatagcatacgtgctttgctttttccaaatgacatcgcaccttttccaccacccatttgcatttgacgcataaaaaaaatccaaacaccaataagtaataacattggaaaccaagatataagaatagaaataaagagactcggttcctcgggaattgcaccgataattttaactcttttcactaaaagattatctaagagtttaggatcattaataggaatataggtagtgtatttactgctatcttttttagtaacactaatcatgcgtccgttaatatatgcttcacggatttgatcttgatttacttctgataaaaaagttgaatagtcaactttatggttatttacatcattagtgttaaaattttgaaaaatagacattaatacaactgtaataactaaccagaagataaggtttttaaccatgtcactcaaaggaacaacctctcattgaatctatattttaaaaacaacacagactattataatatttatctggttgccagaatgaatatctctcgagatcttgttcgagaagttttaggtttgcaaattttaatttttttaaataacattttaatttctttatacaattcattaaaaccctctccctgaaatgattttaacaaaaaaataccatttttagataaaacatgttctgatatttttaatgctaacttgcataactcaataatacgcggcatatcaatagaaaaattccctgttatattaggagccatatctgacataactaaatgaaatgtaatattgctaaaagtatttagcattaaattgagtgtttttttattacgaaaatctccttgaaaaatatcaacacctgttattggtctaataggtaatatatcacaagctataatacgtcccttttttcctattctattactggcatattgtgaccaacttccaggagcagcgcctaaatcaataacattcataccaattttaaatattttattatttttgtctaattgttctaatttaaaccaagctcttgaacgtatattatttttttttgctgccttgacatattgatcttgaaaatgttctaataaccaacgatttgaacgatgtttttttttttgaacaatcatgttttctctattttaaaatcaatttttcaataaaaattttaataaaactaaatcattttaaaattttttaaaattatatgtaatttatctttaaaattttatattcaacatcacctcctggtgtacatatgattacaacatcattaatttcttttccaataagacctcttgctattggagaattaatagaaattaaattttttttaaaatcagattcatcatcgcctacaatccgataggtaaacttttcattgtttttaatatttaaaatactaacagtagaaccaaaaattactctgccattattagatatttttgttacatctataatttgagaattagatagttttaattcaatttctttaatacgtccttcacagaaactctgttcttcacgagctgaatgatattcagcattctcttttaaatcaccatgttctctagcttctgctattgctgcaataatacgaggacgatttatactttttaatttttttagttctcgacgaagtttttcagcccctcttacagtcattggaattagattaatcatattaatactccatcattttttatttaatatttcaccataatatctaaaaaataaaaatattttttaaaattcaaaaaaatgttaaattgtcttattgtgtttgataagattatagctttatataatttttactattagctttctattttagatatttaaaactttttaaatagaaaaccataaaaatatagctttattttaaaaagatctaataaaatcagataaattatataaaaagatatttaaaaaatataaaaaaaattaaatttatttaataaattacttaaaacttatttttataaaatttaataattttttacaaaaaagatatcttttaagattgaaatatatctatctattttaaagtaaaaaatataatttatcaaaactttaaaaatttagttatatattcatctattctcgtttgacttaataacctatattttcacttaataagcaaatattaattatttttaatattttcatagaatagtgaaatatctaattaaaagtaaattttaaaatggacaatcaagaaataaaattattacttattaaaaaattaaatttagaacaagctaatattacaggagacagcaatcatataaaaataattgctataggaaatattttcaaaaatgtcagccaagtaaaaagacaacaaataatttatgcccctttaatagatatgattaaagaaaaacatattcatgctgtatctataatgtcctatacaccggaagaatgggaaaaaacaaaaaaataaatatttctaatgatctattgaaataaaaattatattaatacatacagagattaatggatacatggaaaaattatacgtagaaggaaataaaatattaaatggccatgttatcatttctggttctaaaaacgcggctttacctattttatttatgactatattaacagaaggaaaaataaaaatcggaaatattccgaatttaacggacattaacatagcacttaaattgctagtatatttaggagtaaaaataacaggaaacgaaacattatgtattgatgctagttcgataaatattttttgtcctccatacaatttaatcaataaaatcagagcttctatctggatgttaggtcctcttttagctcgttttggcaaagctaaaatatttttacctggaggatgtaaaattggcagtagacctatagatttacatttaaatggtttaacacaattaggtgcaacaattaacttaaaaaataactgtattgatgcttatgttaaaggacgtttacaaggaaaatacattttaatggaaaaaattagtgttggtgctaccattacaattatgagtgcagccactttagcgaaaggctctacaattattgataacgccgcttgcgaaccagaaattgttgatattgcaaagtttttaaataccttaggagctgatattattggggcaggaagtaataaaatatgtattaaaggcgtcttaaaattaactggtggtacacatcaagtcattcctgatagaattgaaacaggaacatttttagttgctgcggcagcctctcaaggtcatattacttgtcataagactgaacctaaacatttaacaaatgtattgatgaaactaactgaagccggagcaaaaataaaaacaggaaaagattggattaaattagacatgagaggtaaaagacctaaatctttaaatatttgcactgctccttatcctggatttccaacagatatgcaggctcaatttgctctattaaacagtatttctaaaggcataggtactattactgaaaccatatttgaaaaccgttttatttacacctctgaattaattaggatgggagctaaaataaaaattaaaaataacaccattatatgttatggaatacctaaattaatatcttctaatgtcttttctagtgatttaagagcatcagcaacattaatattagcaggatgtattgcggcaggtataacaatagttaatcatacttatcatcttgtcagaggatatgaatcatttcctaaaaaattaaataagataggagctaatattaagataatatagatataatcaattttttctataatatttaacaaaattttgaataataatattctttattaaaaatgtttttttaaaaaatttaatgattttttgtaaaaacattataaaaatataattattaaataactggagtgttttatgtatgcagtttttataagtggtggaaaacaatatcgagtagttaaaaatcaaattattagattagagaaattaaacagtccactaggaacaacaatagaatttgataagattttaatgctttttgataaagattctataaaaattggaaccccttttgtagaaggaggaacaataaaagctcatattcaaaatcatggtcgtcttaaaaaaattaaaataattaaatttaatcgtcgtaaacattataaaaaacagcaaggtcatcgtcaatattttaccgacgtaaaaatcatagatattaatagtattaaaggagaagtttaaataaatggcacacaaaaaagctggtggttctactagaaatggacgagattctaatgctcaaagattgggtgttaaatgttttggggggcaattaatctcagcaggcagtataattgtaaaacaacgtgggacaaaatttcatcctggtaaaaatgtaggatgtgggaaagatcacactatttttgcaatagtaaaaggaaaagtggaatttaaaaaaaaaggattaaaaaaaagaacatacataaacattataaattagacatgttatttatataaacaaaccccttttcaaggggttctatcttttttatcaaaatataagatataaaaagttaataaatttcgtaaatataagtattaaatgtcaaaatgcttactaataatgatggaatattaaaaacggataaacaatgaaatttattgatcaagctataatacatgtaattgctggtaatggtggaaatggttgcgttagttttagaagagaaaaatacattcctaaaggaggtccagatggtggaaatggtggagatggtggaaatatttggttagaagctaataataatttaaatactctcatagatcttaggtttaaaaaaaagtttcaagctcaaaatggacaaaatggatcaagtagaaaatcttcaggtaaaaaaggagatgacataaaaatacatgtgcctatcggaactaaagtaataaactatcaaactcgggaaataataggtgacttaattcaacacaaacaaaaaatgctaattgctaaaggaggttggcacggattgggtaatgctagatttaaatcttctacaaatagaacacctagacaaagcacattaggttcaatcggagaaaaaagagatatacaattagaattaatgttgcttgctgatgtagggacattgggaatgcctaatgttggaaaatctactctagtcacaaacatatctggagctaaaacaaaaatttcagattatccattcacgaccttacatcctgtattaggcagtgtaaatattcaaaaaaataaaaaatttatcatagcagatattccaggtataattaaaggggcatcttatggtgccggattaggaattcgttttttaaagcatttagaaagatgcaaattattacttcatattattgatttagttcctcaaaataattgtcatccatcagataatataaagactgtcttaaatgagttaaaaaaatatagcttaaaattatataataaaccgagatggttcatttttaataaaatagacttattaagtgtagaagaactaaatcaaataattaaagaaataatatttcaatttaaaatacatgaaaaatattatttgatttcttccatgaaaaaaataggtatcaagaagttgtgttcagatataactaaatacttgaaaaaataaaaaagaactcggttcattaagaaaaccaagttctttttaatcaaaactacttacatcttgttcaagtttaacgtttagaaaattgcggacgttttctagcttttcggaaaccgacttttttacgttcaacttgacgcgaatcacgtgttacaaatccagcttttcttaattcaaaacgcaatgtttgattatatttaattaaagcacgagtaataccttgacgaattgcacctgcttgaccagaaatacctcctccttttaccgtgatataaatattaaatttgtctaccatgtctactaattctaatggttgacgtacaatcatacaagaagtttcacgaccaaaatattcgtttaaagaacgtttgttgacaacaatctctccattaccagatctaagaaatactctagcagaagagcttttacgacgaccggtaccatagttttgagtttgaatcatttattttatatacctttctgtcaaatatttaataattgaggacactgagctatatgttcatgattttcattagaaaaaacttttaactttttaaacatagaacgtcctagagcaccttttggaagcataccttttacagcaatttcaataactctttctggatgactagaaatcatttcttcaaatctagattgttttataccacctacgtaacctgtatgatgataataaattttattaatccttttatttcctgtgactaatattttagaagcatttataacgatgatataatcaccagtatcaagatgcggagtatattctgtcttatgtttccctctaagatgaaacgataatgcacttgctaatcggcctaatattttatttgtggcatctacataataccaatgtcttttaatattacttgatttaattgaaaaagttttcatataaaatctacttaaatgtgattatttatatagaaaataatactatgattggcattaataagatatagtaaacatattttactaaaatatatttttaaagtatttatatatatcatttctagaattaaattaattaaatcaatcatatttttaataatgatatatatttttctgtattaactttataaaaaatttttataaatattctattttatattcagatacattatatcttttataggtaataaattatgcctgctaacaattccttgctaatctttcgtgacgaaattaataacattgataaaaaaatagtaaaattattggccgaaagaaaaaatttagtatttaaaatagctcaatcaaaaatagaaaataatcaggcgataagagatatagaacgtgaaaaaaaaatgttgcaaaaattaatttttttggggaaaaaatacaatttaaaatccgaatatatcactcaattatttcaactaataattgaagaatctgtggcaactcaaaaaaagttattaaagaaattttgcaatcataataaattaattcctgctaatttttcatttctcggtcctaaaggttcttactctcatattgctgcttataaatatgcagatctcaattttcaaaaatgtattacaaatgaatgctcaacatttgaagaagtagttctatcagtcgaaaataatcaatcagattatgctgttttaccaattgaaaacacctgttctggttctattaatgaagtttttgatattttaaaaaaaactaatttatttattattggagaaattaatatttttataaaccataatttacttactcttaaaaaaattgaactaaataagattaaaacaatatatagtcatcctcagccatttcaacaatgcagtgattttattaaaaaatttccagaatggaaaattaaatatactaagagtactgcagatgcaatgaaaaaaattaagaaatataatgacgtaactaatgcagcattaggaagcgaaataggaagcaaaatttacggattagaaatattaatgaaaaatttagcaaataaagaaaataatattacgagatttattttattaaatcgcaatcctaaaaaaatttctaaaaacataccaactacaacaacattaatatttactacaggacaagaagcaggatctctttctaaagtattatcaatattgcaagaaaaaaaattaattatgaaaaaattaacttctcaaaaaatttacaaaaatccatgggaggaaatgttttatattgatattcaagtcaatttatcatcaacactaatgcaagatgctcttgaaaaaatcaaaaaaattactagatttataaaaattttaggctgttatcctagtgaaaaaataaccccaatagcaccgtaaaatttctaaaaaacgatttttttttaagaaaataaaaatcatgcgttcaaatatgaaaaatttttttaataatttttaaaaataaaagataattattttttaattaacagaaattatattttaaaggtgattgtttttacctcaaataaaatattaataaatttaatgtgagtaataaataatgtttaataatttaactcaacgtctttcagatagtttaaaaaaaattttaaataaaggaagacttacagaagaaaacattaaagaaactataagagaagttcgaaaagctttattagaagcagatgtggctttatcagtaataaaaaaatttatagagaatgtaaaaaaaaaatcaattgggcatgaaatcaataaaagtttaactcccggacaagaatttataaaaatagttaaacatgaattaatatttgcaatgggtgaaaaaaatcattctttaaatttttccattgaaccccctgcggttatattagtagttggtctgcaaggttcaggaaaaactactagtttagctaaattgggaaaatggattaaaaataagtataaaaaaaaaatattaattacatctaccgatacctatcgtgcggctgctattgaacaactaaaaatattatctgatcaaatcgagatagatttttttgagtctgataagcaccatacaccaatagaaatcactaaaaatgcgataaaatatgcaaaattaaaattatatgacgtgctattaattgacacagcaggtcgtttgcatattgataaaaaaatgatgaatgaaattcagcaaatacaagttatatcaaaagctattgaaacattattaatagtagattcaatgatggggcaagatgcaataaacatggcaaaaatatttaataatgatttattgatatctggtataatattaactaaaacagatggtgattctaggagtggaattgctctatctatgcgttacattacaggaaaacctattaaatttataggaacaggggaaaaaataatatcattagaaccatttcatcctgaaagaatagctgatagaattctaggaatgaatgatattatgtcgcttattgaagacattgaagaaaaagtagatcaatctcagattcaaaaactaacaaaaaaattaaaaaaaggtcatgattttaatttaaatgattttttaacacaaattaaacaaatgaaaaaaataggaggtttaaattattttgcaaataaattctctatcaatcatcaattatctaataatatatcattattaaacacagataaaaatactttaaaaaaaatagaagcaatgatatgttcgatgacacctaaagaaagaataaaacctataattataaaaggttcaagaaaacgcagaatagctttaggttctggaacacaaatacaagacgtcaacaaattattaaaaaattttgatgatatacgaagaattatgaaaaaaattaaaactgatggaatagcaaaagtaatacgtggaataaaaaatatgctacctaaaaagttttgaaaaattgtcttaaaaatataaaaaattttttaaaatctcagtagtataatttttttaatttttttcaaataatcctttttatttaataactttttaagaagaaaaaatatggtaaaaattcgtttagctagatatggaacaaaaaaacgtccattttataagctggtagtagcagatagtcgtttttctagaaatggtcgttttattgaacgtctgggttattttaatcctattgccaaaggaaaatctgagatattaaaattaaatttagaacgtattgaacactggactaatcagggtgcccaaatgtcagaaagaactaaaaaattaatcaaacaaaagaggtaatattataaatattagtattaacaaaccaattcaaccattactaataggaaaagttggaaaatcttacggaatattaggttggataaatattttttctttcacagaagaacaagaaaaaatattcaattatcttccatggtttttttttaaagaaaaaaattggacaagaattcaaattaaaaactggaaaaaatataagaataattttattgttcacataaaagatatttctgatcgttcagtagtcagtcagtttactaatgcagacataataattagtaaacatacattacctgcgttgaaaaaaaatgattactattggaatgatattatcaattataaagtatttaatatagatcagcattatttaggaacagtaattaatttaataaggacaagaaataacgatattcttatagtgaaaaataaattaaagatacatcaaaaaaatatattaattccatttatcgacaacaaaataataaaaaatgtaaatactgataaaaaatttattttagttcaatgggactagattatgtgatttaaatgaaaaaaaaatataatgaaactataatatgctttaatattattactatttttccagaaatgttctatgcgatcaccaattacggcataatcggacaagcaatcaaaaaaaaaattattaatattaatttttttaatccaagaaattttagcaaaaataaatataaatctgtagacgatcgtccttatggaggaggaccaggaatgttgatgagtttcgaaccattgtatctagctattcaacaagccaaatctacatcaaaaaatgtaactgttatttatttatctccccaaggaaaagaattaaaacaaaatcatatcgaagaattattagtcaagaagaaaaaaattgttttcatatgtggtcgatatgaaggaatagatcagagaattattgataatcaagtggatgaagaatggtctattggaagctatatactcactggaggagaattggccgccatggttatgattgatgccatttctcgtttaattccaggtgttataaaaacaaaaaagtcgatagaagaagattcctttacgaatgatttacttgattatcctaattatactcgacctaaaattataaaaaatatgtcagttcctcaagttttattatccggaaaccacaatgaaattcgcctttggcgtttaaaacagtcacttggaacaacatggattaaacgtccagaccttataaaaaaaaaatattaaaaaaagaagaaaaaattcttttggatgaatttaaaaaaaaaataaaattaaaaaataatgactaattttttttatttatttaaatttaagaggaaaacatgttcagtattattcaaaacatagaaaaagaacaaataaaaaaaaatatacctgtttttagatccggagatactatagaagtaaaagtatgggttattgaaggctcgaaaaaacgcttacaatcttttgaaggaatagtgatagcaataaagaatcgttgtttaaattcatcttttactgtgcgtaaaatatctaatggagaaggtgttgaacgagtttttcaaactcattctcatggtatcgaagaaattctagttaaaagaaagggtttagttagaaaagcaaaattatattatttgagaacgcgaactggaaaggccgctcgtattaaagagcgattaaattaattttaatatgcagtcatgacataattcttgactgcattattttttatggtatataagctataataaatttttatttaatcaaattaaacagttccaccaatagttaaattttctaatttcatagatggttgacctattccaactggaatattttgaccgtcttttccacaaatacccatcccttcatccatttttaaatcatcaccaaccattgatattttttgcataacttctaatcctgatcctatgagagtagtgtttttaattggtgtaacaatttttccattttttattaaataagcttccgaagtagaaaatacaaattttccggaagtaatatctacctgtcctccagaaaaatttacagcatatattccatagtcgacgcttttaattatatcatctaatttagactttccagataacatataggtattagtcatacgaggcataggtagacacgaataagattcacgacgaccatttccggtagacttaacacccattaaacgcgcattaagtttatcttgcatatatttttttaatattccattttcaattaaaatattcttttgacctggagtaccttcgtcatcaatgcttaatgatccacgttgatttttaattgttccatcatcgataatagtacacaactctgatgcaacctttttacctatcatattagtaaagattgaagtgccttttctgttaaaatcaccttctaatccatgacctatagcctcatgtaacaaaacgcccggccatccagatcctaaaactactggaaatgttcctgatagagcctcttttgaagataaatttaataaggctatacgcacagcttctttagaccaatgatcaattctaatttcttttgaagaatcatcttgatttaaaaaaaagttataatctgtacggcttcctccaccgctacgaccacgctctcttttcccatgatcttcaactaaaacactaattgaaaattgtattgacggcctgatatctgatactaaatttccatcagtagaagcaactaaaatttgttcatatgatcctgttaaagaagcattcacttctataacacgatggtcaagactacgtgctatgtaatttgctctataaagaagatcagttttttctttagaagaaaatccttctaggggattaacatttttatagataggttcaattgttttttttgataaagtttttgtttttcccgatccttttgttaaaataatactgtgtgcttttttcgtactccttcttaaagaatctaatgatatttgatctgagtacgcaaatccagtgctttctcctcttattgctcgtactccgatacctgcatcagaatgataatttccttcttttataatactattctctagaatccaagactcgtgaatatgagattgaaaataaagatctccataatctaattgacgtgtacacagttcttccaaggcaataaaaacatcttgatcgtttattttattcgcatttaataaagattcagttactaattcaaatgtcatttgaactcacttaatttatgataatgttgtaaatgtttattataaaagataaaacaaaaaaagaaaaaaataatttttctaaaaaaatgttatataatattttattagataagtcttctagtaaatttgagatataatcatttaaaaagagattaacatgaaaaataatataaatatattattaataaatggacctaatttaaatcttctgggaacaagagaaactgagatttacggtgatattactctgcccgatttattgaaaaatttagaaaaaagagcaaaaaaacttaatatgtctttaaaacatatacaatctaatgcagaacatgtattaattgacaaaattcattcttcaagaaaaaatattaattatatcattatcaatcctgccgcatttacacacactagtatagctataagagatgcattaattgcagtagagattccttttattgaaattcatatttcaaatatttattcaagagaagattttcgttcccactcatggttatctgatatttctcaaggtgtaatttgtggacttggtttagatggttatcattgggcattagaaacaatatctaatagacttattcatttaaaataaaagattttaaaaaaaatataaaaatatacgaatattaaaaaataaagtattaattagtattaattctttttaaaaaatatattatttttttaaaaaaatagttaaattttttttcgagatgaaaaatataattttgcactctcttatattttttcaaaatagaaagtgcaatttaaaaaatatataaaatatttaattcatactatatttctttaattttttacgcaatgtactacgattaattcccagcattaaagcagcacgtgtttgatttcctctggtatactgcattatcatatctaaaagaggttgttctaattcagatagtgctaattcatataaattattaacatctttgccatttaaattagataaataatattttaaagatttttttactaattcacataaaggttgtttgatatttttatcttgagtattagtagtagataaaactaaaaattctgtatttgtttttttttctagcatagtactatcgactctgatttttttttatattgtatatattttttaaaaaaaattatactgaaaatattaatttttatatatttaataatacattttaagtttttcgtataataaataataattcttattaagaataaatatattcaataagaaaatttataatatattctatatttttaaaagcagttcttgaatatcttgaggaagtggtactgtccatgacattacattttttttaataggatgatgaagagaaagatggtttgcgtgcagtgcttgacgaggaaatttatatattttattagtttttttatcttttctataattcgactggattttaaaaccactgtaacaaggatctccaactaatgggtatttgatgtgcaacatatgaactcgaatttgatgcgtacgccccgtttctaatcgtattgctatatgtgtatgaaatttaaaacgactgaggaccttataatgtgttactgatggttttcctaaatgatgaaccatcatacatgttcttctgttataatgacgcattataggtttgtttatagtcccaccggcaatcattttcccgtgaacaattccttcatattctcgaataattttcttttctttcaataataataacaagtggttataagaaaaaatattttttgcaattaccatcaatccgctagtatctttatctaaacgatgcactattccggcacgaggtaaatctttactatttttatagtgatataataaagcatttaaaattgttcctgatttatttccagaacctggatgaacaactaatccagcaggtttattgattattaatatatcgctatcttcatacacaatatctaaaaaaatattttctgggatatcaactaataaatctttagaaaaaggatgaattgtaagagtctctcctcctaatatttttttatcaggttgatttacaatactttcattaactaagacctgattcataataattaatttttttaaataagaacgagaatattctctgaataatttagataaaactagatctaatctttgccctgataatgaacaagatgatgcaatagaatttaattgtatttttttcaatatagttatccttataactaaataaatatttctttaattttaacgctacatctttaatatttacagaatatgacattctacttttataatatgatattctatagaattagaaacataaatatttttaataagaaattttattaatttaaactgaatacataataatgaaaaaaaagaacagtattatatttgtttttatgattttattctttaactcaacagtacagtctcagtcttttaaaaaaaattattttacagaaagatatactctttatgaaaaatctaataaagaattaagaaaagaaaactttgataatgcaatttctatattagaaaaaataaaaaaaaataataataccgctaatattagtaatgataaaattcaaatagatttaatctatgcttactataaaatattaaatttcgatcaagctagaaaaaatatagaagaatttatgtatttttatccaaatcatccgaatatagattacgttgtatatatacaatgcttaattagcatgtctttagataaaaacagattttttagtgttttccctataaattattataaaaatgattatttttatgcaaaaaatgcattcttccaattaaagtattttatttatcaatatcctaaaagtcgctatgttgtcaatgctaaaaaaaacttaatatatataaaaaatcgtctttccgaacatgatctttcaattttaaaattttatttctttcataaagaatatatagcagttataaatagaggagaagaaatgcttcaaagatattcagaaacaccatctgcccgaaaagctcttatatatatagaaaaatcttattatgcattaaaaatttttgatacagcaaaaaaaatatcaaaaataattttattaaataaaattcaataaaaaaacttgattattattttcaagataaaaaacgtttatttattaaaatctatctcaaaaaatattcttttataaagatcataaaaataaaacaatataataaattctatttgttaaaaacactttatatcagtaatattattttcatactaaccagaaaaaaaatgaaaaaaacaacagataaaatacgtcaagatttcttaaaattttttaaagaaaaaggtcatatgattattcccagtagttctttagttccttataatgattctacattattatttactaatgcaggaatgaatcaatttaaagaaatctttttaggtgaaaaaaaaagcaattatccacgtgttgctactgtacaaagatgtttaagaactggaggaaaacataatgatttagaaaatgttggatatacttcaaaacatcatacatttttcgaaatgcttggaaattttagttttggagactattttaaaaaacaagctattgagtatgcttgggaattgttaacatcaaaaaaatggtttaacataccacaaaataaattatggatttcagtatataaagatgatactgaaacatataaaatttggaatgacatcattaaaataccttcagaacgtattattagaataggtgacaaaaataaagagaaatacaattctgaaaatttttggcaaatgggtgatactggtccatgtggtccttgtactgaaatattttatgattattcagatacaatgaaaattgatccaatagagtttttagaaaataaaaacggccgttttgttgaaatttggaatattgtttttatagaattcaatcgtatctccaagacaaaaattatttctttaaaaaataaatccatagatacaggcatgggattagaaagaatatctgctgttttacaaaatgtgtattctaactatcatatagatgtatttcaaaaactaataaaaaatatagctcaattaagctctataaataatttagaccatatttcttttcaagtaatagctgaccatattagatcctgttcatacattattgcagataatattcttccatcaaatgaacatagaggttatattttaagaagaattatcagaagagcattaagacatggacataaaatcggaattaaaaaaaatttttttcataaactagtatctagtgtaattcacgttatgggaaaaactggtgatattttaaaagaaaaacaagaaaaaatagaaaatgttttaaaaatagaagaaatgcaattttcctatacacttgaaaaaggtttaaaaatattaaattctgaaatagaaaaaatagataataatatactatctggaaaaactgcattttatctttatgatacctttggatttccgattgatttaacatctgatgtttgtcgtgaaaaaaatattaaaatagattataatagctatgaactagctaaagaaaaacaaaaagaacaatctaatatcaataaaaaattttataaaaattataacaacaatattattctaaatgatacctgtatttttgaaggttatacaaaaactataacccgatcattagtaaaatatatttttgtaaataatcaatctgtttcgaaaattataaaagatgaaaaaggcgtaatttttctagataaaacgccattttatagtgaatcaggaggtcaaataggtgatataggtcagttatatcataaaaaatcatcttttctagtagaaaagacaaaaaaatatggaaaaacaataggacatattggaaaattaatttcagggcaaattacactaaatgattctctttttagccatattgatgaagattatagatatgcaattcaattaaatcattcagctacgcatttattacatgctacactgcgcaaaattctaggggacagtattgttcaaaaaggttctttagtaactaatacatatttgagatttgatttttcttatgttaaatcgatagacacatctcaaattcaaaagattgaaaatattattaatacgaatattcgtaataatattaaaattaaaactgaagaattaaatttagaagaagctaaaaagaaaaaagcaatggctctttttgatgatcagtacggttctattgtacgagtcgtattcataaataatttttctatcgagctttgtggtggaacacatactcaaaggactggtgatatcggactatttaaaattatttctcaatcaagtgtagcatcaggaattaaaagaattgaagctgtaacaggacaaaaagctatagattatttacatgaaaaagataattatataaaagatatctctctcttactgaattgcagtactgttgatattaaagaaaaaactaaaaaacttacaataaaaacaaaaaatctagagaaaaaaataattcaactacaaaaaaaagaaaacacacaatacataaaaaaaatacttaaaaatgttactgagataaaaggaactaaacttttaactaatattttttatgattatgaacaaaaatcattaagaatgatagttgatcaattgaaaaaagaactaaaaaatacaattattatcttaataaatattatcaataatcgttttacgattattgtaggtgtaacaagaaatttacttgattatataacagcaataaaaattatggagatgattattaataaaacaaacgggaaaggtggtggaaaaaaagaaattgctgaaggaggaggtgctaatacaaaacaactacctagtattttaaatactataaaattatggattaatgataaattaaatgaaaaataaaaaaccagtattttttatatatattgtatattaaatgaactaaatattaaaaaatttgttagttaaaaatttactgaaaaatatgtaattagaatatactataaaatatattgtgatttacgtttaaccctatattattcatgacgttaggaacgaaagagaccgaactcttttgatctttcaaggaacaaagaatgcttattctaactcgtcgggtcggcgaaacattaataattggcgatgaaataactgtaacagtactaggagtaaaaggaaaccaagtacgtattggtgtaaatgcccctaaagaagtttcggtacatcgtgaagaaatatatcaacgtattcaagctgagaaaaaaaaataaaaaatataatccatactacgtcttactgtactcaagtaagatgtagcttgaatatttaatttttcaataaactgaaaaagacatcattgatataaaaaaatatgtttgacttatataaaaaaaaaagtaaaataaaataaaaatatcttttatagttaggtgagatggccgagaggattaaggcgctcccctgctaagggagtatgcagaaatacctgcatcgagggttcgaatccctctctcaccgccaccaattaaatttttattgcatccgtagctcagttggatagagtactcggctacgaaccgagcggtcggaggttcgaatccttccggatgcaaaaataaagaatcaaaatcatctctcaactaaaaaacaaaaaaagtatcgataaaaataataaatttaaaaatatttttacaaaagtatttgaatattttagattaggagataacattgatagaagatatctcaaaaaaaatcgcttggttaaaaaaaaatccaaaaatgttaaaaggaatttttcgaggaatcgaacgtgaaaccttaagaattcaaaaaaatggacatttttctaaaacaatacatccgtatttaatcggatcctctttaacacataaatggattactacagacttttcggaaaatttattagaattcatcacacctactagcgataatatagattatttattatcctttttaacagatcttcattcttttacagcatcaaaaataaagaatgaacgcatgtggccttttagcatcccttattgttttaacgatcaaacaaatattcaaatagctcaatatggaaaatctaatattggaaaaatgaaaactacttatagaataggtttaaaaaatcgctacggcgatttgataaatactatttcaggtatacactataatttttcattacctttgtttttttggacaaactgggaaaataatcaaaataaaaaaaataatactgatcttatttcatctggatacttaaatttaatcagaaattattatcgatttggttggattgttccgtatttgtttggatcatcaccagcaatatcatcattttttttaaagaatacaaaaaaaaaatataaatttaaaaaaaataaagaagatatattttatttgccatggtctacttcattaagacttagtgacattggatattctaacactaacattctagacctaaatattatgtttaatgattttaatgaatatattgaatcatttcaaaacgccctgaaaacaccatcaaaaaaatttattaatataggattaaaagatgaacatggcaatttcaaacaattaaatactaatattttgcaaatagaaaacgaactttacactcaaataagacccaaaagaaaaacaaaagatggagaatctcttctagaagcgttaaaaaataggggtattgaatatgttgaaatacgttctttagatgtcaatccattttcacctataggaataaataaaaatcaaatacttttattagatctatttttaatttggtgtgctttaatcgattcacctaaaattgataaaacagattttttattgacaactaaaaattgggaaagaattatttatgaaggaagaaaacctaatcagaagatttatattaacaataacaatgaaacaaaaacattaattgaaatagggcaaattatatttaaagatttaaatgaaattgctttgatactcgattccaattcaaatgatttattatatcaaaaagcatgtaaagaaactcaattatttttaaaaaatccagaattaacttattctgctcaatgtttaaattttttaatgacaaccggaataaaaaaaacaggtctctatttggcaaataaataccacgaaaaatttattaataaaaattacttcaacttaaatcaaagtgttttagaacaagaagttatacgttctcatcaaaaaaaaatagaaatagagagagaagatatattatcatttgaagaatacattagaaacaaataattctcccatgctaacaaacatgggatgtacataaagataataatacatgctttcatattgcatacactttttctacatttaaatagtatttttaagatattctatctttaaaaaaatcaaattatcaaattatcaaaataattctcttaagataattcatttaccttgtcaagattttcccatggaaattcttttctaccaaaatgtccatatactgctgtttttaaataaataggctgaagaagattaagcattttaattaatccatacggacgcaaatcaaaaatactacgaaccaaagaaattaaagcactattgcttatttttccagtattgaaagtatctatcataatagaaataggttcggctattccaatagcgtatgaaagttgaatttcacaacgagcggccaaaccagaagcaacaatatttttagctacgtatctagcagcatatgctgcagaacggtctacttttgaaggatctttaccagaaaaagcaccaccgccatgtctagacatgcctccataggtatcaacaataatctttcgaccagttacaccacagtcccccataggcccccctattacaaatctacctgtgggattaataaaaaattttgtattctttgttaaccatttatctggcaatactggtttaataatttcatccataactgcttcttttaaatatttctgagtaatgttttcttgatgttgtgtagataaaacaacagtatctattgctattatatttccattattatatttaaatgtaacttgacttttagcatcaggtctgagccaaggaagaatatttttttttctcaattcggattgtttttgcattaaaagatgagcgtaagtaataggtgctggcatgaaaaattcagtttcattagtagcataaccaaatataattccttgatctcctgctccttgttttaaaggatcaaaacgatttataccttgattaatatctggtgattgttttccaattgcacttaatactgcacaagaattagcatcgaatcctgcatcagaattaacatatccgatatcattaatagtctttcgagtaatttcttcaacatcaacccatgcagttgtagtaatctctccaccaatcaaaaccattcctgtttttacataagtctcacaagcaacacgtgctttaagatcttgtttaagtatttcatcaagaagagcgtcagaaatttgatctgcaattttatctggatggccttctgaaactgattcagatgtaaaaagatactcggtcattttatatatttaccttattttaaaataattgtatctttatatttttaagaaacaaaaataaatgtagtatagattaagatctatattgtttttaatttacaaaaaagtcttactttattataatattttttatatataaaaaaattacaaatagatatttattattaatatataaaatataatatattttttaacataaaaaaacgatatgtttttattttttaataacaacatattaaaaaattttgttttttaaaaatagaaaaaataaaaaatgataaaaaaaatgtttattgttataataagtatgttttttttttctcttcaaacaaaagaagctattttaaaaaaaaaactatagaaaatttctatcaagcaaaaattatatcaattaaaattcataaaaatgcacctgggtctttttactgtggatgtcaaattatttggaagcaaaaaaaaggaattcctaatctatattcttgtgggtataaaattcgaaaaaataaaaatcgtgctacaagaattgaatgggagcacgtagtaccagcctggcaatttggacatcaaaaaacatgctggaaaaaaggaggtcgtaaaaaatgcatggaagataaaaaatacaaacatattgaatctgaccttcataatttacagccagctattggcgaaataaatggagatcgctctaattttatgtatggtcagttaaataatagtgttgcacaatatggaagatgtaacatgaaaatagattttaaacgaaaaatagtagaaccacctgaaagagctcgaggtgctatagccagaacgtatttttatatgaataaaaaatataatattatattatcagaaaaagaaagaaaaatgtttacaatatgggataaaattttccccgtaacaaaatgggaatgtgaaagagaaaaattaatattcaacatacagggtaatcacaacgattatgtttacaagcactgctataaaaaataaaaaaattccgcgtatatatattgaagatgatttagatcttaatcaattttattttttatcagatgaaaatagacattatgttacaaaagttttaagaatgaagattgaagatatcttagaaatatttaataacactcactatattttttttgctaagataatagatatttctaagaaaattattaaaattcaaacttttaaaaaaatattaaaaaatttagaatctccactacatatccatttaggacaagttatttctaaaaatgaaaaaatggattttacaattcaaaaatcaattgaaataggtgttaaaaccattacaccattgttttttgaaaatgatcattttcaaaaaaaaagaataaatttttctaataaaatcaaacgttgggaaaaaatagctatttctgcatgtcgacagtgtaatcgtaatattataccaaaaattaaaattcccatgaatgtctttcattggtgtgaaaacaatcaaaataatgataaaaaaatcatttttcatcccaagtctacattaacgatgaaatgtctaaccgaacctataaaatatatccaaataattattggatctgaaagaggtttttttaatgatgaatttcaaaaaattattaaatatggatttattcctataagattaggtcctagaattttaagaacagagacagcttccgttgtagccattactgcattgcaaacaatgtttggtgattttaagtaaatttaataagtcttgattatttttaatttgtattatttttaaaagtaaaaaattttaaatatataaaatataattatctattttcttttttattaatagttcgtattcctttttgtgttccaatcaaaacaatatcggcgcttctagaagcaaataaaccaactgtaactactccgggtaatgaattaatttttttttccatcgatataggatcttttatacataaattatatacatctataattatatttccattgtccgtaataacatttttacgatattttggcgttccaccaatttttatcatttctcgaaaaatataagaaagagccattggaataatttcaattggtagaggaaatgttccaagaacatctactttttttgatttgtcaataatacaaacaaatttttttgacattgaagcaataattttttctcttgttaaagcacctcctccacctttaatcatttgcatatgattattgatttcatcggcactatcgacataaatagcaagagaactaaaattttttaaatcaaaaacttctataccgtgtttttttaataaaacagtagacgaattagaactagatacggctccatatatcaaattttttatcgtaccgagtgcttcaatgaaataaaaaatagttgtaccggttccaactccaatgatcgtaccaggatcaatataatctagtgccgcccaagctgcttttttttttagtttgtttaaattcatgatatagaagattattttattttaaataaaaattttaaaatcgaaaatagtggctttttaatctaattcaattgacatctaatatataattaaaaataaataattttataaaacacattgtcattctttatttgaaggaaaattgtttaatagaaaagtcaaaaataaaagatagttttattagattggctggggtacctggattcgaaccagggatgccggtatcaaaaaccggtgccttaaccacttggctataccccattttataaaatattttttagtttttttatttatttttattagaatttaattaaaattattttaaataattttctaaattgtattaagtaatatacgggaggcgagatttgaactcgcacacctttcggcgccagaacctaaatctggtgcgtctaccaatttcgccactcccgctctattaaaaatggtagctacgacgggactcgaacccatgaccccagcgttatgagtgctgtgctctaaccgactgagctacgtagcctaataaaaatatttgtacataagaaaaaaatatattttataatatataaattgaataatcaacaaaattattgtaattagaaaaaataacaatggaaatataatggatactaaaaaagaaattaaaaacaataattttatttgtcaaattattaataaagatttaaatgaaaataaaaatttatctttttatactcgcttcccacctgaacccaatgggtatcttcatattggtcatgcaaaatcaatatgtttaaattttgaacttgcgagtttatataaaggacgatgcaatctaaggtttgatgatacaaacccactaaaagaaaatattaaatacattgaatctatcaaacatgatattaattggttaggttataaatggcatggtaatgttcgttatgcttctgaatattttttaaaattatatcaatatgcacaggaattgattaaaaaaggattagcgtatgtagatcatttaacaaaagaacaaatacgtgagtatcgaggaactttaaataccccgggtaaaaatagcccttatagaaatagaacaatccaagaaaatatagaactctttgaaaaaatgaaaaaaggagacttctccgaaggagaagcatgtttgcgcgcaaaaataaatatgagttcttcttctattattatgcgagatcctgttttataccgaattatttttattaagcatcatcagactcaaaataaatggtgcatatatcctatgtatgattttgctcactgtctttcagattctattgaaggcattactcattccttgtgtacgttagaatttcaagataataaattcttatataattggattttaaaaaatactagtgttaaacactatcctaagcaatatgaattttctcgacttaatttagaattttctattttgtctaaaagaaaaataaaaatacttattgataaaaacataatagaaggttgggatgatcctcgaatacctacactttctgctttaagaagaaaaggatacaccccgtcttctattaaaaatttttgtcaaaaaattggcgtgactaaacaaaataatttaatagaattttctatgttagaacattgtattcgaaaagaattgaaccagactgctatacgtactatggccatattagatccaattaaaatatttttatataatttagattcaaattataaagaagaatttatagtcccaaatcatcctaataaccctgaaatgggcactcataaaattatttttactaatactatatatattgaccgttcagattttaaagaaaaatatgataaaaaatataaaagattaaaacttggagaaaaaatacgtctaagatattcttacatcattcatgctgagaaaatagaaaaagatgaatatggtaatatctctaatattatatgttattgtgatcttaatactttagggagaaaaccaaaagataataaaaatcccgcggtaatacactggatatcagaaaaaaatacactttcagcagaatttaaattatatgatcaattatttaatataaaaaatccggaacaacaagaaaattttttattgtatataaattcaaaatcattaattaaaaaatttgggtttatagaaaaaaaaataggagaagaaatacaaaaaaaaatcagtaataataatatagaaatattttttcaatttgaaagaattggttatttttgtatagattttatagattctaaaaaaaatcagttggtatttaatcgtactgttggattacgtgatacatgggattcgaaaaaaattaaaacaaaaaacattactaataattagtatcagtatataatattaaagttatattataaattaaaatataatttggtaaaaaagaaaatctattcttaaaaaaatatttatattcacaaaagttttttatgattaaatattgtaataaaatattttacattaaacacttattcattttaactaatatttttatatttagtatgacaaaaaattatatttttattactggcggagtagtctcatctttaggaaaaggtattgctgcagcttcattgggtgcaatcctaaaagcacgaaatttaaacataacaattataaaactagatccgtatataaatgtagaccctggaacgataagtcctattcaacatggagaagtatttgttactgaagatggtgcggaaacagatttagatttgggtcattatgaacgttttattcatacaaaaatgacatttttgaataattttactacaggtggagtttattctcaagtcttaaaaaaagaaagaagaggtgattatttaggagcgactattcaagttatacctcatattactaatgctattaaggaaagaatcattctatgctccgaaaatagtaatatcatccttgtagaaataggcggaactgttggtgatattgaatcacttccatttttagaggcaattcgtcaaatggcagttgatattggacgtaaaaacgttatttatatacatttaacactagtaccgtatattgctacagcaggtgaaataaaaactaaacccactcaacactcagtcaaacagttactttcaataggaatacaaccagatattttaatttgtcgttctgaaaaaactgtacctcttcacgagcgaaaaaaaatagcattattttgtaatgtaccagttgatgctgttatatctctaaaagatgtgaattcaatatataaaataccaaaattgttaaaaaaccaaaaactagatgattatatttgtaactattttaaattaaatgtccctgaagctgatttacaagaatgggaagaagtaatttatgcagaaaaaaactttaacaatactattgttattggaattattggaaaatatattaaactacctgatgcatataaatcggttatggaagctcttaaacatgcaggttttaaaaataaaataaaagttgacatacaattaattgattctcaagaggtagaaaataaaaattttcaaatcttaaaaaatcttaatggcatcttgatacctggaggttttggcgatcgaggaattgtaggaaaactattatcaatacaatatgcacgagaaaatcacattccatattttggtatttgtttaggcatgcaaatagcaattatagaatttgcacaaaatgtagttggaattaaagaagcaaattcaacagaatttgatcctcaatgtaaatatccaattattgatttaataaaaaatagacctaataattcaagtaaaaattacaataaaatcgagaatcgtataaatttaggtggcactatgagattaggtagtcaaccgtgtaaattaagtgcaaatagtttatctcgaaaattatataaccaagaaattattatagaaagacacagacatcgatatgaagtaaataatcttctatttaaaaaaatagaagccgcaggattgcaggtaacaggacgttctcaaaagaataatgtagtagaaataatagaattgtctaatcatccatggtttttagcttgtcagtttcatccagaatttacttctacaccacgtgatggacatccattatttatagattttataaaatcagcaggaaaacataaaaaaaattttatataaaaatattttttaacatattaaggttaaacatgtctaaaattacaaaaatcatagctcgtgaaattatagattcacgaggcaatcctactgttgaatctgaagttcatttagaaggcggatttgtcggactagcttcttctccttccggagcctctaccggttctttagaagctttagaattaagggatgaaaataaagacagattcatggggaaaggagtggaaaaagctgtttcgttaataaacgaaaaaatatctattgcattaaaaaataaaaatgctagaaatcaaagtgatattgatcatattatgattgatttagacggaacaatcaataaatccaaattaggtgctaatgcgattttatctgtatctttagctgttgctaaagcagctgctgcatctaagagaatgcctttatatgcgcatattgcagaaataaatgagactcctggtgttttttctatgccattgcctatgataaatattattaatggtggaaaacatgctaataataatatagatattcaggagtttatgattcaaccaatcagcgcaaaaacagtaaaagaatctatacgtataggatgtgaaatatttcatgcattaggtgaattattaaaagaaaaaggaatgagtacaactgtaggagatgaaggaggttatgcaccaaacttgaagtctaatgaagaagcattaaatattattcaagatgcaatacaaaaaactaaatataaattaggacaagatatacgattagcaatagattgtgctgcttcagaattatataataaaaacgaaaaaaaatataatcttaaaggagaaaatattagtttttcttcaaaggaattcactcattatttagaaaaattatctcaaaaatatccgatagtttcaatcgaagatggacaagatgagtcagattgggaaggatttttatatcaaacacatgtactaggtaataaaatacagttagtaggagatgatttatttgttacaaataaaaatattttaaaaaaaggtataaaaaaaggaattgcaaattcaatattaataaagttaaatcaaattggaacattaactgaaactctagaagcaataaaaacagcaaaacaagcaaactatggagtaattatttctcatcgttcaggtgaaacagaagacgcttctatagcagatttatctgtaggaacatcatcaggacaaattaaaacaggttctatgagtcgttctgatagaacttcaaagtataatcaattgattagaattgaagaaaatttaggaacaaaatacgctccgtttcatggtttacgagaaattaaatcagcattttaattgtactaatagaatgtagtatattttcaagaatcaggtattttaaaaacatgcctgtttcttattcaaaaaaaaatatttagaaaaaaatcaaacaaaaaatagttttattttgttaaaaaatatagtttagtataagttttagaaatatcataaattaaatatttgtattaattttaggtaatatacttaatggatttattgattctcccaaataacgtatttcaaaataaagtcgcgctaggttagtatctgacgataatcccatcgtagcgatttgctgatttttataaaccctatctttttcttttactaatactgaattattaaaagcataaatactaagataattttgatcgtgcttaataataattaatagaccatattttttaaataaattagtaacgaaaaccacttcccctgcagctgtagaaaaaactggttgtcctttaaaaccaattatttctattcttttatttcctaatttatcaatataaaaatatttagtgttcttatttttaacaggccaagaccagttattagaaaaattaaaaaattttaattttaaagaattattatttttttttattttttttatgcaaaaaaaacatatttttttagtttttatattatctttcaaaaatttttcaatatttaataaatttttaaaaacaacttcacaagaattatgttgttttatactgtttttttctaaatttagaatagaacaatcattattatttttatcaattaaaaaatctcccatccatattttttgacctataattattttataaggttttttgatagagttaaatttagataattcatgataattataaccagaatttttagcaatagaatacatcgtgtcttttgatttcacaatataaaatatcttaaatctatttttttgaaaaaaaccaataaaatgattattgccaataataatttttttatttaaaaaaaaattttttttatattttaaaaaagaaaaacattcattttttttaaaaaaaataaaatcttttgtatattttttatcaataaaaaaattagaatcatatcgattattaaaaaaaaatccgaatgcaaaattattaaaagaaaacgaaaaaaatattaaaaataataatttaaataaaaaaatttttaattgcattatatttatccctttaatttcattaaaaataaatgtcttagacaatatttttttatatatttaaaaaattaaaaagaatgacttatttatttaaatacattttttattttttattagcattacaatcgagtgacaagcgatcgcttcttttcttccaatgcatcctatttttttggaagttgtagatttaatactgatattatctatttcagtattaagatctaatgataaatttgatcgcataaaaaatatataaggcaacatttttggatattctgcaataatagtaatatcaatattacatatatcataatttaatagtatgattttattccaaattttttttaataaaattctactgtcaatatttttgtagatgtaattgttacttgggaaaaaagaaccaatatcacccatagcagtcgctcccaataatgcatcgattaaagaatgtattaataaatcaccattagagtgagcaattaaacctttttcacaaggtattaaaacaccaccaataattaatggtttagtgcttccaaaagcatgaagatcaaaaccatatccaattctcataaaaataacctttttttatttatctataatgtgattttttaaataaaagtttgcaagaacaagatcttcaggccaagtaattttaatgtttctacaactacctaaaacaagtaatggattatatccacaatattctagtgctgatgcctcatctgtaacgctaatctgatctttaattattttttttaaacaattttttagtagctctacctgaaataactgaggagtcaaagcatgccatagattttttctatatactgtgtacactgcttttttttgttttaaattactatatttaatagtatcagatacaggtcttgctaaaatcgcacctactggattttttttaataatagatattaatttttctaaatctttatagcttaaacacggacgaactgcatcatgaactataacccaatctacattttttactactattaatcctgataaaactgaatttattcttttttcaccacccactacagaaataatacgaaaattagacgaaatagataatttatgaaagtaattatcttttttatttaagcttacaattatttgaactatattaggatgtaataataatgttgttaaggtatgctcaagaatagtacgattttgaatttttatatattgtttaggtacatctatcttcattctactacctattccagcagcaggtacgatagctataatttttggttcaaataaattaaccaagatcattttatatccaaaaataagactaaaaaatttttttaaatttaaaaaaaaatttttcttttatttaaaataatttatataaatattatgttttttttttatctttattaatatgattattaaaattttcaatttctaatattatttgattattacgcatatcaagatattcattattttttttttctatcgtaacccttctatatatttttataaaatctaaaacaccatttttcccaaaccaaagagaatattgcaaccaaaataacaaagaaagcaaaaatatttttaatatcttcatgtattactctgaaaaaatttaatttatatgtataaaaatttttcatatcaaatatatttaatctatgttaataaaagatattatattatgattatataaaatttttattaatttttttgagttattttttaaagaatctgtaccctttaaaagaacatcaggtgtattaggagtttcgtatgtacattgtataccagtaaaatcagatatttggcctgtgcgggcttgtttatataattttttaggatctcgagattcacaaatttcaataggtgtatcaatgaaaacttctaaaaagtttttttttcctaacatttgacgtaccatttccctttgatttctatagggggaaataactgataccaatattattagaccagcatgtaacatcatttttactacttctccaatgcgtctaatgttttcattcctatctgccaaactaaaacttaaatcagaacataaaccagacctaatattgtctccgtctaataaatagctattaattccatttttaaacaatatttcttctaaaaaatttgctatggttgattttcctgaacctgagagcccagtgaaccatagtacaattgatttatgaccattttttttttcacgttttaggcgtgtaattgaatgtttttgccaaaaaatattgttttgaaaattattgttcatttacttataaacctttttcattaaaatttttggtatgttccaatgtggaaaatgacgaataattaaatcataaaaatctgattcaaaatctttttgtttattagacggtatttttccttttttgtctaaactatttacaatcattccggcgcctactgtaatgttagttaaaagatcaataaaaatcatattaccagtcattctattttcactataattatcaaaaatcacaggtttgctaaaatatattttaactcgaccaatactatttaaaacaagagaatggctttttaccttttttaaggtattaacatccaacttgaataaaatttctttaatgtaaacacgtattttcttaccagacaacttgacattatatgattctcctgctaataagatattatctgtcatccaaacaatatctatgatagcttcttgggaaggttgtaatatagaatcaatatttacaaaaaaatcaccgcgattaatatctatttcatcttttaatactactgtaattgattcacctatttcggctttttttagttctttatcaaatgttacaattcgagagacacgagagtttatgttctcaggtaatattttaatagtttgtccgacatgcatcctaccagacagtaatattccggaatatccacgaaaatctgaatttggacgattgatatattgtactggaaatctcagttcttctgaactaatactatttttaatttttattgtttctaaaaaacttagcaaggttacaccttgataccaaggcattaattttgttttaaaaacaatattttcaccaagcaacgcagacataggaataaaaataatatttaaatcattggcgagttttttagaaaaaattaaaaaatctttttttatattttcaaatatttcttgtttatagttaactagatccattttattaatggcaacaattaaatatttaattccgagtaaagtagaaataaagctatgtcggtaggtttgttctgataatcctttcctagcgtcaactaataaaatagataaatcgcatgtagaagctcctgtcgccatattacgagtatattgttcatgtccaggtgtatctgcaataataaattttcttttattagtagaaaagtaacgataagctacatcaatagtaatcccttgctcacgctctgattgcaggccatctactactagcgcaagatctatttcattaccttgtgtaccatgacgtttactatcactttttaaaaaaaataattggtcgtcataaatttgtttagtatcatgtaataaacgaccaattaacgtgctctttccatcatctacactaccacaggttaaaaattttaataaagttttcttttgttgtaaatctaaccatttcttaaagttatctttcatattaatgttcatctttttaaatttctctttttaaaaataaccctgtctttttttaaattccattgaacttttttgatcataatcaatagcacgaccagttcgttcacttgttttaacaattaatgtttccttaattatatcttcaacatttctagcttctgattcaattgcattagtcaaaggccaacatcctaatgtacgaaacctaaccattttttcttttattacttcgttagacttaattttcatacgactatcatcgatcactgttagcacgccatttctttctaatactggacgcttggcagcaaaataaagaggaacaatttcaattttttctaaaaaaatatattgccaaatatctaattccgtccaattagaaaggggaaaaacacggatattttctcctttatttatttgaccattatagttccaccataactcagggcgctgtttttttggatcccattgatgtaatgaatcacgaaaagaatagatgcgttctttagaacgtgatttttcttcatctcgtctagcgccaccaaaggctgcatcaaaattatatttatttatagcttcttttaatccttctgttttcatgatatcagtatatttactccctccgttttcaaaaggatttaaacctaataatttcccttttgaatgagaatgcacgattaattctatgttagaagtactcgctatatgatctctgaaaatatacatttctttaaacttccatccagtatctatgtgcagcaaaggaaaaggtatagttccaggataaaaagatttttttgctaaatgtaacataactgaagaatcttttccgatagaatataacattacaggattttgaaaatctgacattacttctctcataatataaatactttctgattctagttgacgcaaatgagtagtattttttttaaacattgtcgcccctcaaataaatgttaatgtagaaaatttatttttaattttctttaatatattttcactttgaaaccatgctagtttcttatgtaaatgaaccacatctccaataatcaataaagatggagtagcagcaaatggaataattttttcaatttcacctaaacaacctacaataactttttgatgaatagtagtaccttgtacaataatagctattggtgttaatttagatcgaccaaatgtaattagtttttgagctatatatacagcttttaatgtacccatgtatacaactaaagtatatgagggatcagatagtatcgaccaattatttaaaaaaccatcaatacatttatgtcctgtaataaatataacaccttgtgagtatttgcgatgtgtcagtggtattccggtataagctgcaataccaattgcagaagtaatacctggaacgacttgaaaatgaatacctgcatctttggctgcttctatttcttcactaccacgtccgaaaataaagggatcaccaccttttaaacgcactactttttttcctttttgtgcgaaaaaaattaataatttaataatttcattctgagtaatattttttaaaccaactcgttttccaacacatattcgttttgcatcacgacgaatcaaatctaaaatatcttcagaaactaaataatcatataaaaccacatctgcttgttgtaaaacttgcagacctcttaaagttaataaaccactatctcctggtccagcacctactagaataatttcacctgttaatgaaatattctgattcatatttttttttaaaacattaatcgcttgttctttattgccattaagaatatgttctacaaaaatactatgaaacaatttttcccaaaatttacgtctttctagaaaatttgaaaaatgttttttaattgctaatctccatttacctgcaattttagcaacatcgcctaatttatttggtaaaattgcttcaattttttcacgtaaaagacgtaataatacgggagcagtgccgcctgaagaaattgctacaattaaaggagaacgatcgatgatagaaggaaaaataaaagaacattttaacttatcatcaactatatttactaatacgcagcgctcattgcattttttaaatatatattgatttaattttatatcatttgtagctgaaactactaaaaatattttatttaaataaatcaaatcaaaatttttagataaccaatttattttttgatcacgtaaaagtaacttcacttctgaacataattctttagcaataacattaactttagctttagcacggagtagtattctaattttatttaatcctacttctcctgcaccaataactaaaacatttttagattttaaatctatgaaaataggaagatagttcacagtcgccttattttaaaaaaaactaaacttattaatagaaaaatatttttttaataaaattatcaattttacatcagatcctatgtaagatacattatttaatatttatttaaactttttaaaatattgatatacaatataaatatgcaagaaatatattattttaacatatcaatgttataaaaatgcgttgttagtatcttatatttatcttaaaaaaatagttaagatacagtttgttactgtaaaacaaaaaaatattttttaataaatttaattacacaagaaaattatatgatgttttatattaaatatttcattaatcataaaaataaaatttaattttcatgtaaaccacattcgcgttttaatccaaaaaaacgagtttcttcctctaacataccaggcatgtgttttttagtagtgtgtgtatctcctacagacgaatatccattattatataaaggatgggtatctaaattattttcttttaaatagtcttttattttatccttagaccaatctagtattggtaaaattttaaatattccttttttaatagaaagatatggtaataaatttcgactttttgattgatcatgacgcaatccagcaaaccatgtttgtactgatagttcattcaaagcaaaattcatgggctgtactttattaatattattataaaaatcaattccttcaatacctttttcccataacttcccatatcgcgcttcctgccacgcagaagatattgttgatctaaaaactttcaaattcaaatgaaatttattagttaaaaaatcaataaaattatatgtttcaggaaacaaataacctgtatcaattaatataacaggaatatccggtttttttttgattataagatgtaataatactgttgactgaataccgaagcttgatgacatgatttgtgtatggggtaaatggcttaatgcccaagaaatacgttcttctgcagaataattggatagaagtaaatttaattcagaaagtatattattttttttttcagaatttaacagattaatattttcaatatagaatttagacattatatttgctccatactaactccaaaaatcgtaaacaggattaatcacttctttaacaaattcttttctaactataaaatctccaaaatcttctttattttttcgttcattagaccatgttttaattaaatattttaaatgaattaatatttcttgttcagtaatattttctttataaatttttggaattcgatttcctatacgatttcctcctatatataaattatatcgaccaatagattttccaattaaaccaatttcagctaataaggatcgtccacaaccattaggacagccagagacacgtaaaattatcacctcatcttctacaccatattttaacatgatattttctaattgagtaataaaaaaggatagcatacgttcagcttccgccattgctaaaggacaagtaggaaatgaaacgcatgccatagaatttttacgtaaattagtacttttatttattaatccagatgataaagctattttttctattttattcttatttttttcagatacttcagaaatgattatattttgattagatgtaattctaaaattaccatcatgaatatttgcaattttcaataatcctgatttaaataatttatcattatcatcatatatacgtccattttgaataaataatgttaaactccaattattgttgatgtctttaatccatccaaatctgtctcctctgctgataaaactatattcgcgaactggtttaagattaacatttgctcgtttttcaatttcttttttaaattcatttaaaccaaaattattaatagtatatctagtttttgcgtttgcacgatcagtacgatttccccaatccctttgtgttgttactatagccttagcaatagataaagtgttttctacagaaatataacctatttcagttgcaagaaatggccatgtatttttattaccatgaataaaagatagtccgccaccaattaatatgttaaaaccaataattttttcattttttgtgatagcaacaaaattcatatcattagcatataaatcaacatcgttataaggtggaattactactgttgttttaaattttctaggtaaatatgtttttcctaatataggttctttttctgtcgtaactatttttttttgatctaaccaaatttccgcatatgccttagtatgaggtaataaaaaatttgaaatttttcgtgcccattcgtaagcttcttgatgaattaaagattccataggatttgatgtacaaagtacatttctgtttacatcattagcagtagctaatgaatctaatcctatactatgtaacattttatgtacatcttttaaatttttctttaaaattccatgaaattgaaaagtttgacgattagttagacgaatagttccatacaatgtatatttgctggcaaaataatcaattttcaaccatttttttgctttaataactcctcctggtagacgacaacgcagcatcattgcgtaacgtggttctaatttttgctcattacgttctatacgtaaatcgcgatcatcttgctgatacatgccatgaaatcgaataagtgaaaaattatctccagtaaaaccattagtaatttcgttttttaaatcatcagtaattgtacctctaagataattactattttctttaattcgttctgcatcagttaattttttttctgtaactatttttttaaattttttattcattaatacacatctcttttataacgtttatttaaacgcagattatttaaaaattcttgagattcttcaagatttaaatgagcgttatgactaataatatctaataatgctttttcaacatcttttgccattttagaagcgtttccacaaacatatatttgagctccttcttctatccaagaccatatttcttgtgaattttctcttattcgatcttgtacgtatattttatttttttgatcttgcgaccaagctaaattcatattggtgattaatcccttttttatatatttttgccattctacttgatataaaaaatcttcagtaaaattaggatttccaaaaaaaagccaattttttccatcagcattatcattgtctctttgctgcataaaagcacgaaatggagcaatgcctgttcctgaactaatcattattattggagtgtttttattaataggtaatcgaaaattatcattggtttgaataaaaatttttattatatcatcagattttaaagattgtgaaagataaccagaggcccctcctaaatatacatgacctgaaattaatttttttactactcctactgtgatatgaatttcattgtcaatttcttcttgtgaagaagaaatggaatataatctaggtgttagtgggcgaagtaaaccaattaattgttgagaggataattttaatggatgatcatgtatcattttaattaaaggagtgttaatggtataattttctaaatcagaatcattagatatgatatcttttaaaaatttgtttttcgaaaaatttgcataacttttaataatatttttagtattattcgttaattcgaaatgattttgtaaagcatcaaaaattgtaataacatcatttttaattgtaattgtttcagaaatattaatagagagtaattctaatatatttttcactaaattactgtcatttttataccatacacccaatgcatcaccaggtgaatacttaatgttcaaattactaatatcaatttcaatatgatgaacatctttcttagaattacgaccagtaattttttgatttgttaatataataccttcagcaggatttttttttgtataatgatttttcgaaagtatcaatgtattttcttgatctatatatgacacagaagatttataaattttttctttactattaatagattgtaataaatcctgagaccatttattataattatcttcatattcaatatctgcatcaaatctatctaataaagaattaccacctaactctttaaatcttttatcaaaatcttttccagcttgacaaaataaattataggatgtatctcctaatccaaaaacactataatataagttatttaaattaggtgcattttttgacattataaatttataaaaagataatgcttcttctggtggttcaccctcaccttgagttgaaataattaaaattaatatcttttcatcttttatttttttgaatttataatccatagcatcaataagacgacttattttattatttttattaaaatattcataaagacgtttagacaataattttgcattaccagtttgggaagcggaaataatcgtaataactggatcgtttttttctgattcatttgtttgaaaagacgttatatttgatgtttgattagcaattttccaaaaataacctgacaaccaagcactttgaatattagtgcaagttctttcaagttcttttaaattatttaattgttctgaacttaatggaaacacgggatcaaacttgttttgatttttcattatactaaatatccaaattttattacattaaaaacttaatattatcaataaaatataatttacagaagatattaattttttgctaccatctaatagaaaaatcaaatttttatgtaaaattttttacttttaaaatcttaaataaatttatttatataatgtataagaatactttactgttaataaaacattatgtattttctatttctattaattttttctctgcgtcttctagaacagaatctggcaatccagacaatgaagctactgatataccataacttttttttgatataccatttttaattttatataaaaaagctatatgtaaatcgcttttaatagcagaaaaatgaaaattttttacaaatttttctttttcttctaattttgttaattcaacaaaatgagtagataataacgtcatagatttatttatgtttattaaatacctagaacacgaccaagctaaagataaaccctcattagttgaagttcctcttcctaattcatcgattaaaactaaactattagatgttgcattgtgtagaatattagatatttccatcatttccatcataaatgttgaatatccattgcttaagtcatctgcagaacctattcttgtaaaaattttatcaatcgaaccaattaaagcatatctagcaggaacaaaactacctataccggccataattacaatgagtgcaatttgacgcatgtatgtactttttccacccatattaggacctgttataatgatcattctttgtgttctggataaaaaaacagaattttttataaatggtgtttttaaaaaacattcaacaactggatgacgactttctagtaaagaaattccatatttttcgctcataataggacgcgtataatttagagatatagcacgttcagataaatttactaacacatctaattctgacaatgctaatgcactattttgtaatttttctaaaaaaggttcaataatattaaaaatttctgcatacaattttttttctagtaataaagatcgcatttctgaatttaaaactttttcttcatattcttttaataaaggaacactataacgttctgtattttttaatgtttgtattatgacataatattttggaattaaatgagtatgacgtttgcttatttgaatataatacccgataattttattaaattttatcttaaatgattcaatcattaatttttttttttctttctgttcaaaatttttaatatattctttggaatttattttaatagatcgtaactcatcaagttcaatattatataattctgctattacaccaccatctcgaatacatttagatggcttcaaactaattgctttttttaataaacataaaacttcttcaaaataaccaatagataaacgtattttttttatatgttttgattttattttttttaatattaaatgtaaattaggtaagatttctaatgtagaacgcattcgtacgaaatcatgaggcgaagcagtacgtaaagctaaacgagaataaattctttctaaatcattaacttgacgtaaaataaattgtaattctttataaaaaaactgcaaagcttccacactttcatgacgatttctaactattttaaagttttttagtggagaatttaaccatctatttaacattctactacccatagatgtaactgttttatttaatattgcagataaagtattttttttttctcctgaaatattttgagtaatttccaagcttttacgcgtactaaaattcataaaaatgctatcttccatgtaattatattttaactgacgaatattaggtaagagagtcatattcattgatttaacatattgtaataaacaaccagcagcacgtattacaaaattgtttttctctataccaaatccatccaaactacaagtattatattgcaaattaagtaacttatatgatgtctctaaatcgaattctaataatgagcgttttctaatacactttctactttcaattaaaaaaacatctgaaaaattttccggatagagtatttctttaggattagttcgttcaatttctgaaagcaaatcacaagaagaaaaaatcttagatacaccaaaaaaacctaatgataaatctaatacggagtatccaaattgattattttctttccagatagcagctataaaattatcttcattttcttcaagaagtacttcatctgtaacagttccaggcgtgattatgcgaactactttacgagaaattaatttttttttacaatcagtttctttttgttgatcacatatcgcaatagattcacctaattttacaagtttagataaataatattctgatttatggcatgggactccagccatcggtatgatcttatgatttgagtatcctttttttgttaaagtaattttcagtagttccgaaatacgttctgcatcttcgtaaaacaactcataaaaatcacccatttgataaaaaagaagcatatcaggatactgtgattttaaagataaatactgttttatcattggagtatgattgttcatactattcttaatatttttttttttcataatataaaatttctatttctccagttatacaatcaatgattgatacagataaaaatatgtaggtatagtattataaatttatatatcatgttattttaaagatcgtttttatttttgaaaaattaacaacataaaaaataaaattaggtgatgaagatgaaaaaaatattgattatattatgtattcttattctatcttgcaatgttttttcttgtgaatttaaaaatggaagagaatatactgaaaaacataaagttatatctaatattccaagtataatagaatttttttcatttttttgtccatattgttatgaatttgaaaaaacatacgatacacaatatttaattgaaaaaaaaattaaaaaaaatataaatattcaaaaatatcatgtttcctttttaggaggaaaattgggatatgttttgacaaaatcttggataattgcacaacaaatgggaattgaaaaaaaaattgttttgcctatttttaaaggtattcaagaaacttatacaattaataatcttgatgatataaaaaaaatatttaaggagaaggcaggagtaagtgaaagtaaatttaatagtttttggaatagtttaactattaaaatattaataagtaaacaagaagaagatattagaaaatataatttaaaaaatattccaactatgcttattaatgaaaaatatgtaattgattactcaaaaattgaagaaatttttaaagatagttttgctgaaaaatatactaaattaattcaatttttaataaataaaaaagaaaaaatttaaatatttttataaatataaattttgaccatattactagtataaatatttaatataataaatttttattctaatcaataaaaatattttaacaaaaatatctgtaaaatataaagagtaaatatgaatcacataaaaaataatccagttattataatagatggtagtttatacctatatgcatcttattatgcattttgcaatttagaaaatacttcaggaaaaccctgtggggcaatatatggaatgttaaaaattatagataatatctttaaaaaatataaaaatttaaaaaaaattattataatatttgattcatctcgaaaaacatttagaaataagctctttaaagaatataaaaaaaatagatcatctatgcctgatttattggttatgcaaattcaacctctttttgaaatacttaaaaaaattggtataaaaactttaactattcccggaatagaagcagatgatgttattggaagtttatcttatcaactcgaaaaacaaggagaaaaaatattaattttaagtcatgataaagatatgcttcagcttgtaacagaaaatattaacatattccataaaaaaaataattgcattattacatcagaaataatacaagaaaaatatggtataaaaccaaaagaatttattgatttcttagctttaatgggagacgctacagataatattccaggagtgcctaaaattgggattaaaacggcgctatttttgataaataaattttctaatattgaaaatatatataataatattgaaaaaataaaatctttaccattaagaaatgctaaaaatatttctattcaactaaaaaataataaggaaagagctttactttcatataaattagcaagaataaaattagatattcctatagacattaaattaaaagacatcattttaaaaaaatattgttctaaaaatacgtttcaaatttttaaaaattatttttcttcataaaaataaaaaaaatttctatagcagttgtattcataatatttttatttattatgtagacatcattatctatttaaaataaaatgctttttatacgaactatttaaacttaatttcaatttttcaataccaatttttttatatgacgaaaataatataatttcaaaagaatccaaaagaacgtttaactttttaaataccatatctgcttgatttttttgatgattgatttttattttatcacatttagttaacagtactaaaatagaaatttttttttgaacagctatactaattattttttgatcaagttttttcagtggatatctgatatccattaaaagcacaaaaagtttaatttgttctcgtttttctaaataatcatatacttttttttgccatttacttctaactaataaaggcgcttgagaataaccatatccaggcaaatcaactattctaaaacccgaaactacttcaaaaaaattaattaattgagttctaccgggagttttgctgaaacgagctaattttttctgattagttaatgcattgatggcactagatttacctgtgttagaataaccaataaacgcaatttcaataccgttttgaatatctatatcagttatttttgaataactttttaaaaaatttgttttattgtaatctaatgaattcaaaatttaatcctagtcgttaaatctgcaagaaaattattcaaataaaaatttaattattttatatgaaaaaattttttaatttagaatttttactctaacttctgtgattataaaagaagtactttttatacatacccataaaacttaatatataaaatgctatttccgcataatgaatctcatcttgtaattctatccataaccagtctgtaatacatctatattttactactttttaaaaggaaaaaaaatgcatcatagtataagaaatattgccattatagcacatgttgatcatggtaaaacaacattgcttgataaattattacaacaatcaggaacatttgaagaacatgaagaaaaaactgaaagaattatggattctaatgatttagaaaaagaacgaggtattacaattttatcaaaaaatacttcaataaaatggaataattataaaataaatatagttgacactccgggacatgctgattttggaggtgaagtagaacgtgtaatgtctatggtagactcagtgcttttggtggtagacgcattagatggaccaatgccgcaaactcggtttgtaactaaaaaagcttttaaatatggtttaaaccctatagttgtaattaataaaattgatcgaattcactctcgtcctgattgggtagtagatcaagtttttgatctttttgttaatttgaatgcaagtgatgagcaacttgattttcctattatatatacatctgccgttcttggaacctcagggacagattatttgaatatgcaaaataacatgattccattatatgaatctattatcaaatatgctcctgctcctaacgttaattctgatcaaaagtttcaaatgcaaatctcacaacttgattataatagttatcttggagtcataggggttggacgtgttaaacaaggttctattaagactaatgataaagtgactattattgatagatttggaaaacatcgtagtggtaaagttaataaagtattaaactattttggattaaaaagaatggaaatcaatcaaggatatgctggagatatcattgctattacaggtcttaataaattaaaaatttcagatacaatttgtcatccagataatctacaacctcttccagcattaagtatcgatgaacctactgtaaatatgtttttttcagtaaatacctcacctttttcaggaaaggaagggaaatatattacatctcgtcaaattttagaacgattaaaaaaagaaaccatgcacaatgttgctttacagataaaagaaacgaaggatccaaatattttttctgtatctggacgcggtgagttacatttatctatattaattgaaaatatgcgtcgtgaagggtttgagttagaagtttcccgtcctaaaattatttttcgtgaaattaatgggattcaaaaagaaccttttgaaaacgtaactttagatatagaagaaaaaaatcaaggaagtgttatgcaatttataggtatcagaaaaggggaattaaaaaatatgattccagattcaaaaggaagggtgcgccttgaatatatattatctagcagagcattaatcggatttcgttcggaatttatgagtataacttctggaacaggtctgtgttattcatcttttagtcactatgataacctccaaaatagcaatattggacaaagaaaaaatggagttttaatatcgaatagtacaggtatggcagtagggttttctctatttaatttacaagaaagaggaaaattatttataggacatggcgctcaagtatatgaaggacaaattataggacttcataatcgttctaatgatttaacggttaattgtttaactggaaaaaaattaactaatatgagagcttctggtacagacgaagcaatagttttaacgacagcaattcatttcacattagaagaagcaataggatttatcaacgatgatgaacttgtagaagtcacgcctcattctatacgaatacgtaaattttatttaaaagaaaatgaaagaaaaagagctaatcgtaataaaaaatctatttaaaataacaaaactataaactaagaaattaaaaaaatcaatattatctttttcaattatataattctatttattcaatagaattatataaaagtgttcctaaattatgaaataatttttaaaaattaacattttaacaaattagaaatcagtaaattatgtttgttcttttgatgaaataaacacaaatgttcggcagtaataattgttattaaatcatttactgcttgtttaaaatcatcattaataattaaataatcatattctgaataatgttgcatttcatctactgctttttccattctatttgcaataactgaatcactatcttggcctctttctcttaatcttttatataatgtatctttagatggtggtaacaaaaaaatactttttgattttggcattttacatttaatttgtttagctccctgccaatcaatatcaagaaaaacatcaatcccagaaaacagcattttttcaatatatttacgcgaagttccataataattactaaatactttcgcatattctaaaaaatattcttgtttaatcataatttcaaattctttttttgatataaaataataatgttttccatgtaattcaccgggtcgtataattcgagtagtatgagaaatagatactcgagtattatataaagtttttgactttaataatccttgaattaaacttgattttcctgttccacttggagcagaaataataaaaagaataccttcagacatgatattttgaaagacagttttatcgaaaattttataaaaaataaatgttgtttttttaaaacatagaacatgcaaataaaaaaatttttgtattattatctaattttttattaaaaaaatattttcaaacccatgtattctgaataaattatttatatttacagatttacgcaaaactacttgtatataaatttcttcacacttaacatgaactatagataataacacaccaactttaaaccattcactatcaactttagtttcaataaatgaaccaattttaggaaaaatacttcctgtacttaccaaaaaacataaaaaatacttatttgtttttttaaaaaatattcgtgctattgtttcttgtccataataacatccttttttaaagctaatagctttaagattatgtaaattaattgcttgtggtgtaaatttgttagaacatattttatcaataacaggaagccctgcttcaatatctaataataaccattgtttactattgtttaaaaatatattttgattaatttttctttttaaagttaaaaaatctaaaaaaggtaaaactaataaaaatcgttctgatggtttctcataccataatatagttttattatcctcatgaattactgggcaactttgatttggtattttaacaaataagctggataaaaatgatctaacattgcaacctgcaaatcctattaaacaaatactatttaattcacgaatttttattttcgaaaaaatggaatacttacaaatttctttaatttgaatttgagaaacacttttgcgttgaatataagcataacctttttcataatgaaacaaatgcatagtactccatactcttccattaaaattacaatgtgcacaaagtgtgtgatgggtcttaagcagtaaatttatatcaatagttaattgaccttgaagatactttttactatcaattccttctacataagttaaagaccattcttcaagaagaatcattgttaatgataattcatttgaaggatagataatattttgtatcgatataaaggatggcatattttatttcctaaaataaattaaatacaaactacacaaaattaaaataaatgcacctatctaattaaacagatataataacaatctaattttaaacattcgaaaaatacaccttaaaaaggttaaaaaatttttaatcaaattaaattaacagaagaactataaaattatgatagaaaataatatgactacaaatcaaattaacagtcttaatagacgtgtacaagatcttaagaggtatctttgactataacaaaaaaaaatcccgtgttttagaaattgatttagaattatcatcacctaaaacatggacagaacagatatctataaaaaaacttaataaagaaaaatatttattgaattctataattcaaaatatcaatgaaatcgaagaaaacattaaagaagtagttatttttttagaattggcaatagaaacacaagataacctagtatttaaagaatctttattagaaattcaaaaaatagaacaagaaataaaaaaacttgaattttaccgtatgttttcaaaaaaaaatgaccactacgactgctatattgatatacaatctggatccggaggtacagacgcacaagattggtctaaaatgttactaagaatgtacttaagatgggctgataaaaaaggatttcacactgaaattattgatgaatctatcggtgaaatagttgggattaaatcatctactattaaagtaagtggagaatatgcctttggttggtttagaacagaaacaggcatacatcgtttaattagaaaaagtccttttgattctggaaagagacgtcatacttcctttagttcaatttttatatatccagatataaatgaaaaaattgatataaatattaattattctgatctcagaattgacgtgtatagagcatctggagcaggaggacaacatgtaaatagaacggaatcagctgtacgtattactcatttgcctacgaacattgttacccaatgtcaaaataatcgttctcaacacaaaaataaagaacaagcaatgaaacaaatgcaatcaaaactatacgaaatacaaatgagaaaaaaacaagaagaaaaacaaaaaatagaacaaaataaatcagatataacatggggaaatcaaatacgatcatatatattagataactctaaaataaaagaccttcgcactggagttgaaaaaaatcatgttcaatctgttttagatggcgatctagatgatttcattgaacaaagtttaattatggggttatgaggaataaaaatgtctgaaatagaaaaaagaaatcatggtgattgtaatattttatacaaagaaataaaaaaaagagaacaaaaacttgttaatatgaaaaaagaaggattttctttcccgaatagttttaaaaaaaatactacttcaagaaaaatttatcaaaaataccaaacaaaaaatagaaatgaactcatatcattaaatattgaagtttccattgctggtcgtatggtgcaaagacgtattatgggaaaagcttctttttttaccttgcaagatatagaaggaaaaatacaaatttatataaatgaaaaaaaaatatcatctgatttttatcgctttcactttaaaaagtgggatatcggagatattttgggtgtgataggaacattatttaaaactaaaacaggtgaattatctatttattgtaaaaatgtaacaatacttaataaatcattaaaacctttaccagacaagtttcatggtttatctaatcaagaaatacgttatcggaaaagatatctagatttaattagtaataataaattatatagtatttttaaaaatcgttctaatattatcacagcgattcgtaatttcatgatagaaaatgattttttagaagtcgaaactccaatgctacaaaatattcctggaggagctaatgctcgtccttttattacttatcataatgaaattgattctcaaatgtatttaagaatagctcctgaattatatttaaaaaaactaattattgggggctttgaacgtatttttgaactgaatagaaactttcgtaacgaaggagtatcagctcgtcataatccagaatttactatgatggaagcatacattgcatattctaactatgaagatatgatggaattaacagaaaatctttttaaaagtattacaaagtttctttttcaagataataaaattatattcaacaacaataattttgatttcagtcaaccatttcgtagattaactatgacagattctattcttgaatttaattcaactattacctcatccgatttaaaagatttttataaaatcagagaatttgcaaaatctataggaataaaagtagaaaaaaaatggggttgcggccagatagaaactgaaatatttgaaaagacagtagaaaaaaaattaattcaaccaacttttattacacaatacccagtagaagtttctccattggcaagacgtaatgacataaatttaaatataactgatagatttgaactttttattggtggatatgaaataggaaatggattttcagaactaaatgatgtagaagatcaaaaaacacgatttttaaatcaaattcaaaaatcaaataaggaagataataaaaatctattttacgataaagagtatatagaagcgttaaaatatggtttacctccaacatctggattaggaataggaatagatcgtttaattatgatattaactaatcaaatcagcattcgtgatgtaattttatttccaacacttcgtccatttaaaaaatagttttaattgattaatgtttttttaaagataaataaaaaaattttagacttttaatgagatatcatatgccaaaacctttaaataacactgaaaataacttaaatactaacagaattaaagatttaataaaaaaatatagccctccattttgggtttatgacgccgatattatctataaaaaaattaatttgttaagaaaatttgatgtgattagatttgctcaaaaatcttgttcaaatattaatatactgcgattaatgaaaaataaaaatgtcaaaatagatgccgtttcattaggcgaaattgaacgagccttattatctggatttaaaccaagtacaaatgaaataatttttactgcggatattttagacgaagagactttattgaaagtagcaaaatataaaataccagtaaatgctggttctttagatatgttaaaacaattaggaaaaatttcaccaggtcatcatgtttggttaagaattaacccaagatttggatacggtcatagtaaaaaaactaatactggaggggaaaatagtaaacatggaatttggcatcctgagcaagcaataccaattataaaaaaatataaattaaaattaataggcttacatatgcatataggatcgggagtcaactatttgcatctaaaaaaagtatctcaagctatgattaaatatgcttttcaattaaatcaaaaaatatcatctatttctgttggtggaggattacctataccctataaattcaatgatcaacctattgatataaaaaaatattttatgttatgggatatagcaagaaagaaaatatctaaatttttaggagaaaaaattgaattagaaattgaacctggaagatttttggttgcagaatcaggcattttaatttctaaagtatgggctacaaaaaaaatgggtaacaaaaatttcgttttagtagatgttgggtttaatgatttaatgagaccaactatgtatggtagctaccaccatatatctgttatttatggagatgataggaagatgaatgaaaaagagactattgatactgttgtcgcaggacctttatgtgaatcaggagatatttttacgcaaaaagaaggaggtactgttcaaaccagaaaactgcctactataaaagtaggagactatttaatttttcatgatacaggagcctatggtgctgcaatgtcgtctaattataatacaagaccacttattccagaaattttactaaaaaataatgattctattgttattcgaagacgtcaaacaattgaagaaatactaaatctagaaaaataaaattttttataataacttatacatatgaaaatatttttttaatcaaaggatattatataaaataaatgtacattttttttcctaaattaaatcctataatttttacgattggtcctgtatctgctcgctggtatggttttatgtatgttataagttttttatttgctatgtggtatggaaaaaagtgcagtattaaaaataaaaaaatatggtacgaaaaaaaaatagaaacattattatattctatttttttaggatcatgcatcggaggaagaataggatatattattttttataatttttcatattattctcaaaatatgttatctgtattttatatatgggaaggaggcatgtcatttcatggaggattaataggtgctataatcgtcatgtcgtatttttcttttaaatataaaaaaaaaatattagaaatatctgatttcatcactccactaataccttttggtttaggcgctggtagaataggaaactttattaatagtgaactatggggtcgtgtatcacccaatttttcatatgcaatgatttttcccaattctcaaaatcaagatttaaaagaaataaaaaaatatcccgaattacaactattattagatcaatacggagcattgccgcgtcatcctacccaattatacgaattttttttagaagggattcttctgttttttataatttattttttttcgaaaaaagatagaccaacaggtagtattagcggtttatttttaattttttatggattatttagaatatttatagaattttttagagaaccagatccacaaataggactattaaaaaatataattactatgggacaaatattatcacttcctatgattattgctggattaattattatgtataaatcttattataaaaaatagattccgaggaattatgaaacaatacatcaaattaattaaaaaaatcatcagggttggaaaccaaaaaaaagatcgcacaggaacaggaactttatctatttttggttataatatgaaatttgatttaaaaaaaggttttccacttcttactacaaaaaaatgtcatattgcatctatcatctacgagcttttatggtttttaaaaggagacacaaacatttcttatctaaatgaaaataaaatatcaatttggaataattgggcaaatgaatccggagatgttggtccaatatacggaaaacaatggcgtaattggagtacaccagaaggacacgaaattgatcaaataaaaaatgtattaatacaattaaaaaaaaatcccgattcccgtagaatgttagtttctagttggaatgttggagatatagataaaatgagattacctccttgccatgttctatttcaattttatgtatttaacaatacattaagttgtcaattgtaccagcgttcttgtgatgtgtttctaggactaccttttaatatagctagttactcaatacttatacacatgatagcacaacaatgtgatttaaaagttggagattttttgtggacaggaggcgatgttcacttatataataatcatatagaattagcaaaaaaacaaatactcagaatacctcgaacgcttcccaaactaaccatcctcaaaaaacctcagtcattatttcaatattgtttcgaagactttaaaattattggatatcatccttatcctgctatcaaaggagaaatatctatataaaaaaataaaagacttgtataagagataatattttttacaaattaaattggattaatttttaagcatatgaaatatatatatataaaaacttggggttgtcaaatgaatgaatatgattcatctatgataatcactttattagaaaaaaataatcaatactcacttaccaagtcagcggaaaatgctgatattttaatattaaatacttgctctataagagaaaaagctcaagaaaaagtttttcatcaactaggtagatggaaaaaaataaaaaataataacccaaaagtcattattgctgtagggggttgtgtagctactcaagaaggaaaagaaatttttaaaagagcaaattatgtagatatcatatttgggactcaaactttacatagattaccaaaaatgatcgatgaagtagaaaaaaaacgcaagttatcaattgacatcagttttcctaaattagaaaaatttaaatattttttagcacctaaaaaaaaaggatacacggcagatatttctattatggaaggatgtaataaatattgttctttttgtgtagtcccatatacaagaggaaatgaaattagtcgtccatgtgatgatgtattatttgaaatatcacttttagcaaaacaaggaataaaagaaatcaacttattgggacaaaacgtaaatgcatatcaaggtccaacctttaatggaaaagtttgttatttttcagaattaataagattagttgcagaaatagatggaatcgagagaattcgatttactactagtaatccacttgaatttactgatgatattattgaagtatataaagacacaccaaaactagtaagttttcttcatcttcctgttcaaagtggttctaataaaattcttaatttaatgaaacgttcatatacaacagaagattatacatctattattaaaaaactaacaattgccagacctgatattcaaattagttcagattttattgttggatttcctggagaatctgaaatagattttgaaaaaactatagaatttataaaaaatattaattttgatatgagttttagttttatatactctgctcgacctggaacaccggcctctaatatgaatgatgatcttgatctaaaagaaaaaaaaagacgtttatatattttacaagagcgtataaatatacaaacaatgctctggagtagaaaaatgttcggaagtatacaatctgttttagtagaaggtgtatctgataaaaatatcatggacttatatggtcgaacagaaaataatagagttgttacttttcaaggttcatctaaaatgattggacaatttgttaacgtaaagatcaaaaaagtacacacacattcattaaaaggtgaattattttaaaagtaattcattcaaaaaaaaatttgaaaaatattataataaacattcaatattgttgtaaaaataataaaaatatacccaaaaaattatattttaaaaaatggatacaaaaaattttatgtaaaaaaaaaatataaacattataacaatccgtattgtagatgaatgggaaattaaaaaattaaattttaattatagaaaaaaaaataaaccaacaaatattttgtcgtttccttttaataaatttattaaaatcaattataaattattaggagatctagtactgtgtaaaaatataatagaaaaagaatctttaaagtataacaaatcattggaatcacattgggctcacattacaatacatggaacactgcatttattaggatatgatcatcaaaacaataaagaagcagatattatggaacgacttgaaaacaaaatcatgttgtctttaaattacaaaaaaccacatattttaaaaagtttttaatcttttataaaaaatattttaacctaagtatttctaccatagaatagtagaacatattttaaaatagataatctaataccatgagtgataaccatttacaaaactctgataaaataaatagaaaaggatttttttctattctattaaatcaaatttttcatgacgaacctaaaaatagagaagaattattagtattaattcgtgattcagaacaaaacgaactgattgatcaagatacttgcgatatgttagaaggagttatgcatattgcaaaaaaaagaataaaagaaatcatgataccaagaacacaaatgattacattaaaattacatcataatttaaacgaatgtcttgatgttattattgaatctgcacattcacgttttccagtgatgagtaatgataacaattatgttgaaggttttctaatcgctaaagatttgcttccatttatgaaacaatcagcaaatattttttgtataaaaaatatattacgaccggccgttgtagttccagaaagtaaacatgtagataggatgttaaaagaatttcgttcaaaaagaaatcatatggctatcgtcatagatgaatttggagcagtttcaggtttagtaactatagaagatatacttgaattaattgttggagaaattgaagacgaatatgatgatgaagaaacattaaatattagaaaaatacaaaaatccacattttctattagagctcttacagaaataaaagaatttaatgaaacgtttaatactaatttcagtgatgaagaagtagatactataggaggattagtaatgaaagaatttggtcacctaccaagtcgtggtgaaagtattaatattgatggttattcttttaaaatttctatagcagatagtagaaaggttatacaaatacatgtaactattccagaaaataaaacacctgttttaatagaagcataatgctgcttatctttataaattgaaaaaataaaacaataaaattattttttttcattaacattgtaagttttacattttataaatatttcttttagagaaaaatatggaaaaagaatattcaccaaaaaaaatagaaaattacgtacaggagttttggaaaaaaaacaaaacttttgaagtcaaagaagatccaaaaaaagaaaaatattattgtcttcctatgcttccatatccctctggaaaattacacatgggtcatgttagaaattatactattagtgatgttatttctcgatatcaaagaatgctaggaaaaaatgtgctgcaaccaatgggttgggatgctttcggtttacctgctgaagaagcagctataagaaataatacagatcccttttcttggacccaaaaaaatataaaatacatgaaaaaacaactccaatcattaggttttagttatgattggagtcgagaaataactacatgtcatccagaatattatcattgggaacagtggttttttactaagctatatgaaaaaaaattagtctataaaaaaaatagtttagtcaattggtgttcttatgataaaaccgttttagccaatgaacaagttattgatggttgttgttggagatgtcaaaataaaataagaataaaacaaattccacaatggtttataaaaataagaaattatgctgaatctttataccaagatttaaagaagttaactcactggcctgaaaatgtaaaaaatatgcagcgaaattggattggacgaataaaaggatttgaaatcaccctgaatgtttttaatacttgtcaaaaattaaaagtgtttactcaaagattggatcttttaatgggtgttacatatatttcaatatcttcttgtcataaattatctataaatttatctaaaaaaaatgaacttattaaaaaatttataaaaaaatatagatatatctcacaagaagaacaatataaagttaaatatacaggaattaacacaaatctatttgttgttcatccaattactaagaaaacaataccaatttggatttcaaatgctacacatatagaatatggaactaatgcagtcttatctattccaggacataatgaaaatgattggaattttgcagttaaaaataatttaaaaataaaatatgttatttttaatcccgatcatcaagaacctaaattatatacttcttttttagatataaaaggaacattatttaattctcaagaatttaatggattgaatcttaaagatggtactgaaaaaataaaaaaaatactgtataagaaaaaaatattaaaagaaaaaattaattacaaattacaagattggtgcatatctagacagcgttattggggaacacccattccaatggcaaaatttaaaaatggtaaaatgataccgataccagaaaaccaattacctgtagttttacccaaaataagaaaaaatacaaatctattacagcaagctattaattttaattctaaatgggctgaaatttttattcatggaaaacatgctattagagaaatagatacttttgatacatttatggaatcatcttggtattatgcaagatatacttgtccaaattttaatacaggtatgattgattcaatagcatcaaaatattggttacctgtcgatcaatacattggcggaatagaacacgcaataatgcatttaatgtattttcgattttatcataaattactccgtgattttaaattagttgattttgatgaaccagtaaaaaatttactatgtcaaggaatggttctttctgaagctttttataaaattgatagtaactctcaaagaaagtggtttaattcatcatcagtgttaataaaacgtaatacaaaaggagaaattattgaatcacatactcaaaaaggagaaaaattaatttatgcaggtatgattaaaatgtctaaatcaaaaaataatggaattgaaccagaattaataattcaacgatatggagcagatacaattcgtttatttattatgttttctgctcctgtagaatctgatctagaatggaaagaatctggtttaaaagggatatatcgttttttaaaaaaactctggatgctaatatttaattatattgatataaaaaacacacataaaaaaataaattttgattttttgaaccatcaacaaagtgaattgcgttatcaattacacaaaacaattgctaaagtgtctgatgatattggtcgccgacaaacatttaatactgccatttctgaaattatgaagttagttaatcaattgtcaaaagctccgataaaagaagaacaagataaatctattatgcgagaatccttaatttgtatcatcaaaatgctttatccatttacaccacatttttgtttttttgtctggaactattttaataatcatagctctattgacaacgaaaaatggcctatctttcaaaaagatattttatcaaaaaaatatagtactattgttgcgcaaattaatggaaaaaaacgatgtgctacaaaaatatctgattctttaactaaagaagaaatatttttatacatacaaaatcaacccataataaaaaaatatttagaggatgttgatatcaaaaaaataatatatatcccgaaaaaaataataaactttgtaacataaattttttaaaatactgataataataacgttattactaatatgaaaaatatatatccaaatgaactaaaaaaaagtttaatgcaaaaattgcattatttttatatttttttaggagaagatttttttttattagaaaaaaatcaagatatgatattgaattttgcatataaaaaaggattcctagaaaaaattataattgatgtagaaaaaaatcaagattggaaaaaaattattttattttataaaactaataatttattttttaaaaaaactactttagtaatcaactttcttataaaaaagttaaatgttattttaattcaaaatcttaataaaatgttttctttattgcatccagatatattaataatattaaaattcaatcatttatcacgttttattcaaaaaaataaatcattaaaagaatttaaaaactacaatatagtttcttgttttacgccgtataatttaaattttattaattggattaagtatgaaatacaagaaaaaaaaataaatattgaggaaaaagcattttttttattatgtaaatattatgaaggtaatactttatttatatataaaattttagatatgctatttataatatggcccgatacatgtattacagaaaaaaaaataaaaaaaattatcattgagttttttgatgtttctccatcatattggatcaattctatatttcaaggtaaaacagaaaaatccttttatatattaaatattttttttaaaaaaaaatataatcctcttattttagtacgttctttgcaaaaagatttgttacaattgattcatatgaagcgtgaaaaaaaaataagtatttatgtaatgttagaaaaatataatatttttgtaacaagacgtaagttttttatcaaggcatttaataaaattaacaacgatagtttattaaaagctattcaaattcttgtaaaaatagaagtaaatatcaaaaaaaaatataataattatgtttggaatcaactacaagaattaattttaatattatgtaactaatattttatatattaataaaaaaatgaaaaaattatgtgcaatttttggtggaaattttgatcctattcattatggtcatattaatttagctgaaaaattagcaaaagatatttctataaaaaaaataatactattacccaataactatcctcctcataggaacaaaactcaaacatccatatcagataaaataaaaatgatcaaacttgctattcacaataatcctttatttgaaataagttatttagaaacaaaaaaaaataatattttttatactatagacacactaaaaaaaattagaaaaaaaataagccatttagaacccttatgctttataataggagaagataacttacaaacattttatctttggaaaaattggagagaaatattattatattctcatttattaatttatcctagaaaacacaaaaaacaaaaaaatgatgaattagaaaaatggattcattcgaacactgtatatgattgcaatttgctacataagcaaccatgtggtttgatttttttttcacacgcaccttgtatcaatatttcttctagtagaattagaaaaaattatttttatggaaaaaattctcattcactcttaccgtctattgtaaataattatattttattaaaaaaattatattatactaatcaataatacttttgattttttatctcacataaaaaaaaatctatttaaaatagattcgataaaaaaatgaaaaaaaacattattttaaatttaattggacttagatgcccagaaccaattatgataataagaaaaactattcgtgatatgaaagataatgaaaaaatactaattttatcagatgatcctgcaactaagagagatattccgaacttttgttattttatggagcataaattattaaaaaatgaaattaaagttaaaccttatcgttatttattaaaaaaaggattataggttttgataaaaatatcaaaaacactttttatcatcatcaaatgtttaatatatacactgtatatctaatatatagaaattttatatatacgaaaatatagtgtatacattaaaaaattctattactattagtaatagaaaatattttatatattaatcaatatattcaacattcttcttaaaggttctgcagcaccccataaaagttggtctccgacagtaaaagcagataaatatttcttccccatatttaattttcttaaacgacctattggtatatttaatgtaccagttacagaagatggagttaattttagcaatgtatcttgtatgctatttggaattacatcaacccatttattatgatttctaataatttcttcaatatcttctaaagaaacatccttttttaatttaataacaaatgattgactgtggcaacgaagtgaacctattcgtacacatgtaccatcaattaaaattgtatctttagtgcctaaaattttgttagtttcagcctgtcctttccattcttctcgactttgaccattactcatttctgtatcgatccaaggtatcaggcttgcagctaaaggaacagaaaaattttttacaggaaaattaacactacgtgatattttagttactttatcttcaatgcttagaattgaatgagaaccttttaataagtctgtttcaacacttttatataatatccccatttgatttaataattctatcatatgacgcgcacctgctccagaagctgcttgataagtagatacagcaatccattcaactagttctgtttgaaacaaacctcctagagacataagcattaaactaatagtacaattccctccgacaaaagttctaattcctttgtttatagaatcttctataacattataattaactggatctaatataattacagagtcatttttcatacgcaaattagaggctgcatctatccaataacctttccaaccattttttcttaaagtcggataaatttctttagtataagagcctccttgacatgtaattataatatccatttcttttaatacatctatattataagcattttctaaaatattatatgatatattatttataatgggaccatcttgaccaaattgagatgttgaaaaaaatacaggtttaattcttgaaaaatcattttcttcttgcatacgttttaataaaactgatccaaccattccacgccaacctactaaaccaacaatttttatcataaatcaatacacggataatttacattaacaataattttatcaaaagtgatatgtagttaaagtaaaaatttttccgcctcctaaaataatcagtaaaaaattaatcaataatcatcaatttcatataagaaaaatatatgcttttaaaaatgtaaggaatttttaagaaaaatattcaaatagaaaattctatttttaattttaattttaaatatactataaaattataatttttcattataaaaaatattttatgtataaagattatcacttgaaaaggatataatagattaaaatgactgaaataatctctacaaccatattgctagttctaatcatggatcctttaggcaatcttccaatattcatgacgatactaaaacacttagacgtaaaacgaagaagaatcgtagttatacgtgaaatgattatagcattaattgtaatgttattattcttatttgtcggagaaaagatacttattattctgaatttaaaaactgaaacagtttcgatatctggaggtgttattttatttttaatcgctattaaaatgatttttccttctgaagataataataatgagatctcttcatctgaagaaccttttttagtaccattagctattcctttagttgcaggaccatctttattggcaacattaatgttgttatcgcatcaatatttacatcatatgttttatttagtgggatcattactaatttcatggttttttactgttataatattactatcatctagtttgttcttaaaattatttggttcaaaaggagtcaatgcgttagaacgtcttatggggttggtgttaattatgctttctacccaaatgtttttagatggaatcagagcatggtttaaaaattaaaatatattattttttaagaacctgttattaatggaataacaggttaaaataatcgacttaaaaatggaataaaaaaaataaattatacataagtaattgtaaaaggtattattatgactataagaaaaatgactgaactaaatataacagagaaaagaattttaataagaagtgatttaaatgtccctatagaaaatggaattatccaatctgatgctagaatactagctgcactacctaccattgaattggctcttcagaaaaaagctaaagtcattattatgtctcatttaggaagaccaaaagaaggatattatacaaaaaaatattccttatttcctatatttgaatattttaaaaaaaaatttaataatacaaaaatatatttttccaataattttttagatggtattaaactgaatccaggagaaatcgcacttttagaaaacactcgattcaataaaggtgagttaaacaatgacgaacaattatctaaaaaatattctgatctttgcgatatatttgtaatggacgcatttggaagtgcacatagaatgcaatcatctacctatgggattggaaaatttgttaaaattgcatgtgctggacttcttttaataagtgaaattgatgctttaaaaaaagcattaaaaaaaccaaaacgaccaatggttgctatagttggaggctcaaaagtatcaactaaatttaatgtattaaataaattgtctaaaattgcagatacaataatagttggaggtggtatagcaaatacatttttagctattgattacaaaataggaaaatcattatatgaaccagattttgtatttgaagctaaaaaattacgtgataaatacaatattattgtgccaattgactctcgtgttggaaaaaatttttgtaagaacgaacaggctataatcaaatcacctgataatatcaaagaagatgaagaaataatggattttggtgatgaaagtattaaaaaaattattagtattattacacaatctcaaacaattatgtggaacggaccagttggggtatttgaatttccaaactttagaaaaggtactgagatgattgcaaagacaattgcaaatagcaatgcattttctatagcaggaggaggagatacattatctgttatcgatatgtttaatataaaaaataatatctcttatatttcaaccggaggaggagcttttttagaatttatagaaggaaaaaaactacctgcaatacaaatgttagaagaaaattttaaaaataaatcaaaataattaataggaaaaacattgaatattttaaatgttattagacctggtgttatgaatggtgacgaagctcgaatagtgtttgagttggctaaaaaaaaacaattcgcaataccagccgtgaactgcataggtactgattctattaatgctgttttggaaactgctgctagagttaaatctccaattatcatacaattttctcatggaggagcttcttttattgctggttataaaaaaaaactatcagagaatcaagaacaagcaattcaaggcgctgtatctggagctcaacatgtacatttaatggcaaagcattatgaaattccagtaatacttcatactgatcattgtcctaaagaaacactatcatggattgacggactattagaagttggtcaaaactattatttcaataataatagacctctttttacttctcatatgattgatttatcaaaagaaagtttggaagaaaacattagtacctgtaaaaaatacttcaaaagaattaagaatattaatatgatgctggaaatagaattaggatgtacagggggtgaggaagatggtattgataatactaagatagataaaaaattactttatacacaacctcaagatgttaattatgcttatgaagaactaaatacaattagtaagaattttagtattgcggcttcattcggtaatatacatggtgtttatcaacctggaaatattgatttgcgccctattatcttaaaaaattcacaagaatttgtaagttctaaacacaatctagaaaaaaatccattgaatttagtgtttcatggtggttcaggttccaatttaaaagaaattaaagaatcgattcaatatggagtagttaaaatgaatattgatactgatatacaatgggccgcatggaaaggtgttttagatttttataaacaaaataaagaatttctacaacaccaattaggaaatacaactaataaacataaacctaataaaaaatactatgatccaagaacgtggataagaaaatcacaggaatcaatatcaattagattagaacaatcatttaaagaactaaactcttttaatattttataaagactgttaattttatcccggggaataaataaaatattctccgaaaaaactttattaaaataaattttatttattaaaatagaaataattgctaaaactttattaattattaataaaaaatatacagagattaaaatggatgaattaaatgtagtaaataatatcaatcatgcaggaacttggttgatacgtaatcaagaattattgcttagatatacaataaatctaacatctgctattattattttagttgtcggaatgtttatatctaaaatcatatcaaatggagctaatcaagtattaattactcgaaatattgatgcaactattgcaggatttctttctgcattaatgcgatatattattattacttttacatttattgctgcattaggtcggattggagtacaaacaacatcagtaatagctatattaggagctgccggcatggcaataggtttagctttacaaggatctttatctaattttgcagctggtgtgttattagtcacattaagaccattaaaaactgaagaatatgtcgatttaggaagtgtttcaggaactgttttaaatattcatattttttataccacacttcgtactttagacggtaaaatagtagtggttcctaataataaaattatttctggtaatattattaattattcacgagaacctgcacgtcgtaatgaatttattataagtgtatcttataacagcgacatcgatttagtaataaaaatattacgaagcgtgatagaaaaagaagaaagggtaattaaagataaagacattatagttggacttagtgaattagctccatcttctttaaattttatagtacgttgctggagtaaaaatcatgatttaaatacagtatattgggacttaatggctaaatttaaaaaagaactagataaaaataatatcaacattccttttcctcagctagatgtacatgtttataaaaaaaaataagataatataatcctcaaaaaaattcaaaaaaattaattaatttaaaaaataaattgctatgtttaccatttacaagtcaaattctcttaatacgctactattaaaagcatatcatattattgaagaaaaacctttttctaatatttttgaaaaagagatatttatttatgataacaaagtgctatttcaatacttaaatatatttattgctgaaaaaaaaggtatttctgctaattttaaattttatcatcccaatgattttatatggaaattatttaaaataattttatctaaaaaagagttaaaaaatatatttactcattctatgattatttgggaaattataaaaattttagataataaaaaattttttgaaaattgcagtaaaaaaaaagatatgataaaaaaatttaaattttcatttttaatggccagtatatttaaaaaatatattttatatcgtcctgaatggatcaatcaatgggaaatagaaaaaaatatatcaatttttgacaaaaacgaacaatggcaaataaaattatggatggaaataatacataatacaaaaaaaataaatcaatctagtgatcattttgctaatttattttataatattcagaaaataattaaagaaaaaaaaataaaaaaaaaatatttacctaaacgtttctttattatttcctctttttcaatgaatccttcttatataaaaatttttcaaaatattagtatatatactgatatttatttcttatatattaccccatttaagaaaaatatatttaattttattcaagataataaaatttttacagatataaaaatagaaaaaaaaaatatattaaatgattcattaataacattatggggacaatatgaagaaatttattatttttatattcttaagtctaaaaaaaataaagtaatcaattgctttaaaaaaaataaaaataaaagtttattaagtcagattaaaaataatttttttaacgatagtgaattcacacgcaaaaaaagatttttagaaataagtgaccattcaatttctataaatatttgttttaataaaaaaaatgaaattgaagtgttatatgaaaaattattgatatttcttaatgaaaactcatctataaaaccaggtgatatagtagttacttctttttcactagatacatatatttcatcaattaatttaatatttcaatcaatagataataaaaaaaccattcctttttttatcgctaaaaaatcttctaaaacaacagaaataatgctttggtcttttaaaaaaatattaaatttatcaaatagtcggttcgaaaacgaagaaatattagaattactcgatgttcctgaaatagcagaaaaatttaatttttcagaagaagaaataaaaattttataccattggatagaagaaacaaatattcgatggggtattaatgaaaaacataaaaattatttgttgtttcctaaaaataaacaaaatacatggttttacggtatagaaaaattacttcttagttatgcaatgaatgatacagaaaaaatttggaatggtgttttgtcatgcagttttattaacggttccagatcggaattgataggaaaactgatttcatttataaaaatactagaaaaatggcaaaaaaaactatcaaaattacaataccttacatattggcgttcattatatagcgatttagttagtgatttttttcaaaataacacaaaaatagaaaaatctattcaaataattcaaaaaaaatggatagaaataattgatgatagtttatcatcaaattatttaaaaaaaatttcaattaatatacttaaaaaaatttttttctataaatattatgataataatcatgaaatatttttacctggagtagtaaatttttgctatcctgattctgtatgttatattccatttaaagtaatatgtatgattggaactgatcatacaagtattccgaaaacaaattatttagataactttaatttattaaaaaagtatccgttaattggagatattaatctgtatcaaaaatattcttacttgtttgttcaaagcttatcttgtgccgaaaaatatttttatattagttatatcggatattctgttaaagacgaaagcaaagtacatccttcaattttagttgatcagttattaaattatataacattaaatttttgttttataggcgatcaaaatttaagttacaaagaaaattctaaaaaaatcactaaatatctgtgcaaaaaacataaaaaacaatttttctatgaaacaaaaaatatagaatcttttatacaagatgatataaaaaatgattttaaacatacagaaaaaaatatatctcataaaaatttactaaaaaaaaatactgataatgaaattaatttgaaagatttgataaatttttggaaacatccaatacgatatttttataattctcatttaaaaattaaaattcgtcaaaaaaaacaaaaaatcaatacaacagaaacttttttagtaaatccattaaattcttttaaaataaaaaataaactactagattacatcatacataataaaaatataacaaaattataccaacactaccttctttctggaaaactaccttatcattttttcggggaaatattttggataaaaaatattaaagaaatgaaattgatagcaaataaagtaatgcaatatagaattgaaaaagaagaaaaaaagattaatttaaatatagaaaaataccaaatatatggcgttttatctgaaatacaaagtacagggttgctgcgttggaaaacaagctcaatcagatatagcgatcgtattgctttatggttagaacatttaatttactctatattaggaggttgtgggaaaagcaaaataataggttataaaagtcaaatttggtctttttcttctttaaattctcatagagcacatagttatctactagagtatattaaaggatatataaagggcatgaaagaacctctttttttaacaaaatcaggggcatcttggcttgaccaggtttatgatgaaagaaataattgtattaaaaatgattattatacaaaaataaaagcatataaaaaattattatatacctggaaaggagataattacaccgaaggggaacaagaagattattatttaaaaaaaacaattaccatatcaaataaaaagaacatcaaaaaaatttgtgagagtgctgaaaagtggcttattcccattttaaaaaataaaggttgaaaaaaaaaataacaatttgaaaattgatagtttaaaagaaaaacttaatatatttaaaatacctcttaatggaataaaattaatcgaggcttctgcaggaacaggaaaaacttttacaatagtcctattatatttgcgtttattattaggtattggagaaaaaaaaatatataaaaaaaaactattagttcatgaaatattggtagttacttttactaataaagccaaagaagaattgtatatacgtatcaaagatggaattcaaaatatgtatttaacttgtattaataaaacgacctcagattcttcttttcagtttttttttaaagaaatacatgatataaaagaagctatttatgttttaaaaagagcacaaaatgacatgaatagctcttctatttacacaatacatagtttttgtcaacacatattacaattacatacttttcattttaatgatatttttgaagaaaaaataattgagaatgaagataatttatatttacaagcgacacaagacttttggagacgttttttttatacactaccagaagatattatcaaaattatctatcaagattataaaagcccagaccatcttttaaaaacgataaaaccatttttttatataaaatccattaattttcctacaaaaatattaaataataaaaaactgattatgtatcatgaagaaaatataaaaaaaataattttttttaaagaaatgtggttgatttatcataaaataatacaaaaaacaattaacgatttagaaatcaataagaaaatatatagtaaatttaatctaattaaatggattaataagataacagaatgggctaaatctgaaactaaagattatactattccttctatactaaaatactttacaaaaaaaaatatagaaaaaaatacaatcaataatacatgttcaaagtatattatatttgaagaaagtgaaaaaatattaaaaaagaaattttcattgaaaaatgtcattataatctatgctgtaaaaaaaattcatcagtttctacttaaagaaaagaaaaaaaaatcattgataggatttaatgacttgttaagtatactattaaaaactataaaaaaagaaaaatttttaaaagacttaataataaaaaaatatcccgcggcatttattgatgaatttcaggatactgatattcaacagtataaaatatttaatcttttatataaaaaaaacaaaacaacagtattatttcttattggtgatccaaaacaagcaatatatagctttagaggtgcagatattttttcttatttatatgcaaaatctaaaataaaaaaatactattatcttgatactaattggcgttcttcaataaatatatgtaaaagcatcaattttttattttctcaaaatataaatccatttatatttaaaaatattccatatataccggttgtcccttctagtaaaaacttaaaaatgaattttacaattaatgatgtcgctcaaactccaattagtttttttttacaagaagaaaaagaagtatctatagatgattatcaagtttggatttctaaacaatgtgcaaatgaaattagtttttggttaacttgtgctaaaacaggaaaagcaaaaatcactactaaaaatggggaaaaaattcttacagctaacgatatcgctatactggttagaaatagaaaagaagctgatcttattcaagatgaattagaaaaacttaatataatttcaatatattcatctaataaaaatagtgtatttcaaactcttgatgctcaagaattactatggatactagaatctattttagaacccgagaacgaaatattattacaacaatcaatggcttcacatattttaaaaaaattatcccttgtagttgaaaacaaaacaatcagtaataaaaactcttattttataatagaaaaattatatgaatatcatgatatatgggaaaaaattggcgtttttcagatgattaaaatcatgatattagaatatcaaaaaaactctttttgcacagaaattaatgaaaatcatataaaaaatttaaattttttacatattggagaattattacaagagcaattccaattttttcataaaaaaatatctttaattcgttggtttcaaaaaaaaatatccacaaaaacacaacctgaatataatgaaagtataaagtgttttgatgaatctccatcgattaaaattattacgatacataaatcaaaaggattagaatatcctattgtttggataccttttagtatagattttaaaaaatcaacactagctatttatcacgatcaaaaaagtttaaaaacattttttgatgaaaattatagcaataaatttttaaaaatagcagacgaggaaaggttagcagaagatatacgttttttatatgttgcacttacaagatctattcttcattgtagtattggattagcttgtttaataaaaaaaataataaaaaatagaaataatagtgatattcatcaaagtggtttaggattcaccatacaaggtggaaagactatgaattatgaaggtctgttggaaaaattaaaaaaattgagtattaacaattttattgaagtaaaaaataatacagataattttagtttttctagaaaaccacaaactattagtttaatatgtaaaaataaatttttaaacaaaaaaaatattagaaatacttggagtataacaagctttagtcaattaaataaaataaataaattatcaaaacatcatcaaaaagaagttgctctaaaagagttatgtataaaaaatcaagaaaaaaaaaatcaatctctattaacaatacataatttcccaaaaggaaaaaaaactggtttaatgattcattatatattaaaaaatttacatgttttaaagaataaaaattctaattggttttcttgtatcttagaaaaatataatattcatataaaatggacttccgtgttaatatattggataaaaaatattataaatacacctcttaatgatgaaaaaattattttatccagaatagatgaaaaatcatctataagagaactagaatttttttttccgataaaaaatatgttatatagtacagaactaaataaaattattcaatctattaatccaacatctattacttctccacaattatctttcaatccagtcaaagggatgttaacaggattcgttgatttagttttcatttggaaaaaaaaatattatatattagattataaatctaattggttaggaaaaaataataatttttattcttctatacatataaacaaagaaatagttaaaaaaagatatcatctacaatatcaaatatacactatagcgattcataaatatttacaaaaaaaactaaaaaactataattataaagatgattttggaggtgttttttacttttttttacgtgctatagattgtccaaaaaagaacaatggaattttttatactatgcctaattattctctaataaaaaaaacgatgactttaatttcataaaaaatatgcttattttattaaaaaaagctgtaaaattgaaaattatacgtccaattgatttttatttttctcaatttatcgcacaaaaaaataatattgttatgttagttgctgcttgtgtaagttatgaaagcagtagaggttatatttctctgccaattaaatattttgaaaaacattattttttttctagttcaaatgaagtatttataaaaaaaatattgactcttttagaaaaaaaaataaattggcccgttgagttattaaaacatgcatctattggtaatggtggtacttctacacctttagttttacataaaaaaaaaatatatctctataaaatgtggaaatctgaaagtaatatttttaactatttatatacaaaaaataaaaaaaataaaattaatcaaaaaaaatgctcaaaaatattggaaaatttgtttcctcaaaaaaatatgagttttcagaaaatagcggtagcattaactttaataaataatataacatttattattggtgggcccggaactggaaaaactactactatattgaaaataataattgcattaataaaaagttcaaaaaaatcaataaaaattcagttatctgcaccgacaggaaaagcgacaacacatttaaatgaaattctaaaaaacaatatctttgatctgtatttttctgaaaaagaaaagtgttctctaccatctacagctacaactatacatcaactattgggtattcaaaaaatatcacaaaaaagtttttttaataaaagtaactgtttagatttagatgttttgattatcgatgaaatctcaatggtagacattttaatgatggaaaaaatattatcttcaatttcaaaaaataccaagttaatttttataggagatcataatcaattaggtccaatagaatcaggttctattctaagaaaaatttgttattacgcaaatgatggatatagctttaaatctatgattagtattgaaaaacttacacaatataaattgtgtaaaaaaataaataaaaaaacaacaaactttattagtgataatatatgtgttttaaataaaaactacagatttaataaaaattcaggtatttatacgttgtctaatgctatttttaagaaaaaaactaggatcattgaaagtctatttgataattcgataaaaaacatttttttttatgaaactaactcttctgaacaatataaaaaaatgatcaaaaatatatgtttaaactatgaagatttttgggaaaaaatatataaaaaagcgacaatgaaagaaataatagaatcttttcaaaattatcaagttttgtgcatattgcatgatggtttatttggtgtgaatattataaataaaaagttagaagaaaatatgtataaaaaaaatattataaaatatttttatattgatggagaagaatggtatatagggaaacctattatgattattaataataatcgtgctctaaatgtatcaaatggaaatataggtattactaacatcaataaaaatggcattttacaagtatcttttttaaaagaaaacaatacaattaataatattcctgtaaagatattaagaaattataaaactgcctgggctattactgttcataaatcacaaggttcagaatttatgaatacagctttaatactacctaatttcaactctcatattttaaataaagacactttgtatactggtataacaagatctcgaaaaatattaagtattttttcagataaaaaaatttttttaaatactatttttaaaaatacgaataaaatattattttaattttagtaatttatttttttaataattcctgaaaatatttaaattacatcaatcattaaaatttttgaaccacgctgatagttatacatcttctttttactttccggtaaaacttcaatgtccactaaaataaaacctctttcttgaaaccaatgaatactctgggttgttaatacaaaaattcttttcaagtgcatgtctttagcgttcattttaattttttttaacaatgcgtccccacgagaagaattgcgataatcgggatgaacagctagacaggccatttctcctattttttccttaaaaaaaggatataacgctgcacaagcaatagttaaattatcatgttcaataatagtaaatttatctacttctatttctaattgctctcgtgatctacgaactaaaattcctttatgttctaatggacgaattaattctaatattcctccaatatcattaatactagctcctcttattttttctgctgattccataaccatttgagtaccaataccatcacgagaaaataattcttgtaaaagagctccgcttttatgatagctaattaaatgactacgattaactccactcttgcaggcttttattgatccttttaaaaaacgaacagtagaggaaatataatcaccttttttttccaattttttaattatattttttatatcattagacagtaattcagaaataattttaccttcgtcattaatcactccttgattaccacaaaaacctatcattttttctgcttttagttcaatgctaacttgagtagctatttcttcggaagttaaattaaaactttctcctgttacagaaacagctactggaccaattaaaactattgctccattatttaattgacaattaattgcatttttatcaatcctcctaactctgccactatgacagtagtctacgccatcatcaactcctaatggttgtgaaataataaaattaccactaaccacgctaatatttgctccttgaagaggggtgttagttaaactcatcgacaaacgtgcggtaatgtcaagttgcaattttcctgcagcctgtttcacttgctccaaagatgctaaatcagtaatacgtatagatttatgataaattattttgatatttttttcttttaaactagtattaatttgaggacaagcgccgtatacaactaccaaacgaatgcctaaactatgtaataatcctatatcattaatgatactataaaaatttccatatttgatcgcttcaccacctaacattattacaaacgttttacctcgatgagcattaatgtaaggaacgctgtgacgaaaaccctgaactaattcagtattacgttctttcatatcaatcctcttgcatttttaatgcaatatatatattatttttttgttaatttaatttttatcatctcggacaagataatattaaaattctgaaaggtttttttgaataatttgaaaaaagacagggttgaattaatttttttagaataattataattttaataattataattttaatatattggttgcgggggctggatttgaaccaacgaccttcgggttatgagcccgacgagctaccagactgctccaccccgcgcctgtattaatatacatattacacttttataaaaaaattgcaataatttttataaaaaaattgttaattaaaaatattttattaatcaataagtttgaatatataaaaatgcaaaaaaaaatcattaaaacaataatattttttagtttattttttttatttgaaaaatcatatgcatatataaatatcaatcaaggacaacagtatgaaaaaaaactcattcaaaatttgacaaaaataaagcaaataaatattaaaaaaaaaataattaatgcagaatcattttatattcaagtggaaaaaataaaaaaattttctccatctttatatttaaaaaatgagtctacttataaaacaattttaaaatggttgaaaaaaaactctaatattaatgaacttaatgaatttggaatcaatttatttcaaatgaaagggatagataactatggtaatgttaaaataactggatattataccccaatagtacaagctagaaaaattaaaaaaaataactttaaatatccgatatattctatgccttatcatctaaaaaaaaatgaacctttaccaaaaagaaaagatatatataatggagttttagataaaaaatatattttagcttatagtaattctttaatagataactttattatggaaattcaaggtagtgcatttatagattatggaaataagaaaaaattaatattttttagctacgcaggaaaaaatggttggccctataaatcaattggacaaatccttataaatcgaggtgatatagaaaaaaaaaatatgtctatgcaggctattaataaatggtttacaaaacacacaaacaaagaaatacaagatttatttgaaaaaaatgaatcctttgtgttctttaaagaaacaaaaaaaaaacaggtatatggagcaagtgctgtaccattaatagcgcaaacatcagtagcagctgataattctataatcaaaaaaggaagtgtaattttattaaaaataccaatacttgatcaaaatggtgtgtttttaaataaatatgaaatgcgtttagtaattgctttagatgtaggaggtgcaattaaaggccatcattttgatatttatgaaggaattggtacaaaagcatctatactatcaggttattataatcattatggatatgcttggatactgaataaaaaataattaattatatcaatttaaataataagaaaatataaaaaatgaatataatccaatcaggaattacagctgaaaactcatctattgctataataattgctcgatttaatgaatttattaataaaaatttattactaggagcactagataccttgaaaagaataggtcaggtacacgaagagaacatcttaaaaatatatgttcctggaacatatgaaataccaactattgcaagttatatcgcaaaatctggaaaatatgatgcgatcatcgctataggaacaattataaaaggacaaactgatcattttaaatatatcgctaatgatactagtagtagtctttctagaattagcgctcaatattttttacctattacactagggatactaacaactaaaaacattgagcagtcaattgaaagatctggaacaaaaatgggaaacaaaggatctgatgccgctttagccgcattagaaatgattaatgttatgaaaaaattaaaaaaagtaatatattattaaacatctattttaatattcaactatttataatgaaatatactgaatttgaaattatatcaaaatactttaaacgtaatcaaaaaaaagatgttaatgaaattaaaggtattggagatgatagtgctttaataaaaataccaaaaaataatattcttgcaattagtactgatacactagttgaaggaactcattttttaaaaaatatatctcctgaagatttaggatataaaacagtagcagttaatctcagtgatcttgctgctatgggtgctgaacccaagtggacaacattatctattacaatgcctgaatctaataatatatggctaaaaaaatttagtagcagtttttttaaaatattaaacaagtataatgtacgattaattggtggcgatacaaaccgcggatcattaagcatcactttaagtatgtatgggttactaaaaaaacagattgcattgctaagaagtaatgctaatataggagatttgatttatgtaactggaactcttggggaaagtgcagccggtttatttttacttaaaaaaaatatttttataaaaaacgtaaatatacgaaattatttgattaaaaaacatttaaatcctatacccagagtttctgaaggtatggctcttagaaaaattgcaaatgcagctattgatttatcagacggattaattgccgatttagatcacatattaaatgatagtcaatgcggagcaaatattaatttaaataaaattcctatttcaaaagttttaattgacaactttcaaagtcaaaattatctgaattgggcattaaatgtaggagaagattatgagttatgttttactatctcaaaaaaaaatatagataaactaaaaataatcaaaaaaaaattcttagtaaatttcacatgtattggatacattacacctattgaacaaggttttaatttatttgataaccaaaagaaaattatctttaaaaaaaaaggttttaatcactttgattaaaagtttataaaaaatttaaaaaatatgttggttaaatatgaacgatatattttacatgaaaagagcaatagaacttagtaaattaggtgaatttactacagcaccaaatcctaatgtaggatgtgttattgtcaaaaataacataattgttggtgaaggatggcatgaacaagcaggaaaaaatcatgcagaaattaatgcattaattatggctggagaaaaagcacaaggaggaacagcttatgtaacattagaaccatgtaatcattttggtaaaacccctccatgctgtaatgcactcattaaatctggaattaatcgtgttgtcatttctaatatagatcctaatcctaaaatttctggtaatggaatactatatttaaaaaaacacggtatttgtgtaaaaacaggtttgctatcaaaagaatcaaaacaatataataaagggttttttaaaagaatgaaaactggatttccatgaatacagcttaaaatagctatatcaatcgatggaagaattgcaatgagaaacggcgatagtaaatggattacttcaaaacaggcgcgtcaagatgttcaaaaatttcgagcaaaaagttcagtaattctaagtagcagttctactattttaagtgataatcctttattaaacgtacgatataaagagcttgataaaaaaacactatctattttccctaataaaatatttcaacatccaataagagtaattatagatagcaaaaatcgtgttcaaccgtcacataatattattaaaacaaaagggaaaatttggttaattagattaaaatctgatagaaaaatatggcctaaaaatacaactcaaattatagaaaaagatcataataaaaaaattaatatattttctcttttaaaattcttaggacagtcagaaattaacaatgtttggatagaagctggcagtactttatcgggattcttattaaattcatatttaattgatgaattaattatatatatggctcctaaaatacttggacatgaagcaaaaccattatgtatgatttatgaaaaattaaaaatatcgaactctcttcaattcaagtttaaaaatatttgtcaaataggtcccgatataagattaatcttatctcccaaaaaaatataatactaatatattaaatatataagagaaattttatttatgaaaccatcttttcgaagaaaagcacgcgcatgtgcattacaagtattgtattcttgggaaatatctcataacaatattaaagaaagtgccatctattttttaaaagaaaaaaataaaaaaaatattgatattgtatacttttatgaattaattattggaattacatacgactgtaaaaatatagataatttaatgaaaccttatttatttagatcattaaaagaattaggacatattgaaagggcaattcttagaatttcattttatgaattacataaaagaaatgatataccttataaagtttcaattaatgaaggtattgaactagctaaattatttggttctgaagatagtcataaatttatcaatggtgttttagataaagcagtatttaaaatgggatataacaaaaaagttgttatcgcataatcatatgataaaaaatcatatctattctatactatactattaatattttttatattattgtcttagccaataaaatatttgtttatagataccttcagaatctaatttatagacatgtctaatttcttcttgcgtgccttgagggataaatgtatccggtagtccaatatttaaaactggcagaaaaatcttatttaccataatgaattcgttaacagcactgcctgctccaccagaaataacaccttcttcaagagtgataaagaatttattttgagaagataatttcaaaatcatacttttatctaaaggcttaacaaaacgcatatcaactaatgttgcatctaacttttctgctgcacaataagcattgtgcaacaaaataccaaaatttaaaatagctatttttttacctcttctttttataagagattttcctattggaattctattcataggcattaataattctcctacaccgtatcctttaggatatcttactacactaggacccttattatgcatatagccagtataaagcatttgacgacattcgttttcattgctaggtgtcataataactatacctggaatacaccttagataagctagatcaaaaactccctgatgagtttgaccatcattcccaacaatcccagctctatcgacagcaaacaaaacagatagtttttgtaaagctatgtcatgtataagttgatcataagctctttgaaaaaaagtagaataaattgaaacaactggtttatagccactaattgcaagacctgctgcaaaagtaactgcatgttgttcagcaatagcaacatcaaaatattgatttggaaagagacgagaaaatttcaccattccagacccttcacacattgcaggtgtgatagctattaattttttatcaaatgcagctatttcacaaagccaggtaccaaaaacatctgaataactaagagattttgaaactgatgaatcacgtgaagatattgtatgccatttgataggatttagctcagcaggaagataaccttttccttttttagttacaagatgcaataaatacgtaccttttttattcttgattttttttaatgtattaataatagaaaaaatattatgcccatcaaatggtcctaaatacttacatcctaaattagaaaaaattgaattaaaagatatagaatgattttgaattcgtttatctttaaaaaatagcttcttattcaataaacgtattttttttcggtttttttgagtattttgaacacttcttaaaatttttaaatgcttgtttaaagctccgacgtttcttgaaatagacatttgattatcattcaatataactaataaattagattgtatttcaccagcatggtttatagcttcaaatgccataccagcagtcattgcaccatcaccaataatacatatagtttttctatttctaccttctttttcagctgcaatagacattcctaaacctgcgctgattgaagtagaagaatgaccgacacttaaagaatcatattcactttcttctcgacaagggaaagaatgtaatccatttttttttctaatactgtttattttttcacctctaccagtcaatattttatgaggatatgcctgatgccctgtatcccataataaattatcaaatggggtattatacacataatgaagagctacagtaatttctactacacctaatccagaagcaaagtgtcctttagaaatactcactacgtctaacaagtattctcgtagttcaaaacataattgtggcaactgttcgacacttaaaagtcgtaaattttctactgaattagcaaaagataaaattggatatttgttaaaattaaaattcattagatactcattattaaatttatttcatacatttgatgataaattttattaatttttctagtatgttggtattgaaatttttttttttaaactatttaatgctaaaaatgatttcttatgtaattgttttattttttttcttgattcatctaaacctattattaatggataagtatgttttttaataatttttttattgtctgtttttacactatcttttttaaaatctaaaatatcatcctgaatttgaaatgccaaaccaatagaaatcgaaaaaagatctaatattgataatatagatttagaaaaattattagaagaaaaatatactaaacgtacagcagaacgcattaaaaaagaagttttatataaattaattatttctaattcagataaatttacatcttttttttctgcttctaaatctaaattttgacccatgcacatcccagatgaaccaatggaataagataattcagaaatcatttttatacgttttaaattagatacatttggcataaaactgtttgatagaatattaaacgcaagactttgcaaagcatcaccagcaagtaaagaagtactttcaccgtattttacatgacaagatatctttcctcttctaaaattatcattatccatacagggtaagtcatcatgtattaaagagtatgaatgaataaattcgatggcagtagatataacatctaatgtagtaatattaactttaaaaacatctccagttgaatatattaaagatgaacgcaatcttttactacctgaaaatacactatatttcattgcttttaaaagacttgatttttgaaaaggcaactgatttaatgtataaaataatttttgattaatacgatgtttgtatctctcatatagatgaaaaaaatgcatatttagcacctaaaaaaataaatatttattatatataaaaatttgattatactataaataaaatctatttcttagaaaaaaactaaaaatcaaccataataaaattataaataattcaaaataaaatatctgtgaaaagtttaaaaaactatataaccatccgctaaaaacacctccaaaaaaaatacctaaaaattgactagtagaataaatgctcattatactacctctataattatttgataattgcctgctaagatgtgaagaaagaaaaacttcaagaaagttaaaagatataaaaaaaatctgtaaagaaattattaaaaataataaatttttttgtgctgataaaaaaataatttctgaaaaaagaataaataaaatacaaatttcaataatattttctaaaatatatttatatttacaataaaatataaataagaataaaacaaaaaaagaaattaatatagtacctaaatatactttccaatgattgtctaaagaaaaaccagatatttcaaactgattaggaatcatcgtgaacttaatcatcaataaaaaatgtaaaaaaaatactcctaaataaaatctaaaaaaaactttatttaaaacaaagtttaatacttttttatatgaatggagagttttattttgttttaatatatttttttttgaaaaaggaacaaaaaaacaaacaattatcatacaaacaatagataaaaatgcagatatccaaaaaatagaaaaaaacccaaaataatgaacaattataggaccagaaactacagcaattaagaaggaaatagcaaagctaacacctatagcagcaatagatttaacacggttttcttcacggatcaaatcagataaaaaagccatacacacaccagatatagctcccgaaccctgaaaaaatctaccaataattaaaccccaaatggaatgaatactagctgatataatatttcctataaaaaacataaaaagacctagtaaaattattttctttcgattgaatttatcagataatattccaaatggaatttgaaaaattacctgagaaattccataaatacccattgataacccgattaaaaatttattaccaccatctaaaagcatgccatatttacttaaaataggaagaatcataaacattcctaacatacgtaataaaaaaattacgcaaaaacttaatgtaacttgtaattctaaaaagttcattttataatcctttatactcaatttaatatttttttaaaatttatatccagattaaaatatatttatcaaaaaaatgaatactgataacaaaatattatatacatatgaaaatcttgaaaaagattcagagggatatttaaagaaaactaaagattggaatataaaattagcagaagaaatcgcaaaaagagaaaatattactctaagttctgatcactggaaagtaataatttttgtacgtaaattttattttaaatttaatataacaccatcgatgagaatgttaattaaaagcatccaaaaagaaataggaaaatctaaaatgaatagtatttatttatttaaactctttcctaaaggacctgctaaacaagccagcaaaattgctggaatacctaaaccagtcaaatgcttataaaaaaaataaattaaaatattttaaaaaaaaacatcgattgatatcaaaaaattaaaaaaaacaataacaataattgagaaataaaatagtttcctagcatttttcttatcattattcttttttatattagaataagataaaaacgaccaataaaaatttacaatagaagagagaagtaaaaaattataacttaaataacccaaaaaagtaaataacgaactaaaaaaagaaaaattaagaacataaaaaaaaatatgtttttttgttatagcaacacccttcacaacagaaaaaacaggaattttagcttctctatagtcctttattctcataatagaaatagaataaaaatgagacatttgccaaaatatcacaataacaaataacaatatagaacatatatcaatggtattagaaactgcggtataaccaataacagatggtgtagaacccgaaaaacttccgataaatgtagaataaaatgatcttcttttataaaacatggtatataaaaccacataaataaaaaaaccaaaaacagctaaactcattgatataaaatttactaaacaacctaatatagataaacctaaaacgcctaaaaaaatagcaaaattgaatacagaaaaaacaggaagcaatttttttgatagaactctgttacttgtacgcttcatttttttatctatatcaatatcgattaaattgttaaaaacacaagcagaagcaattactaaagacgcccccaagatagtatatataaataaaacataattgaaagcagcatgtctagatgcaaataaaaaacctcctgtaattaaagtagaatttccaataataataccaggtttagtaatttctatataatttttaaacatataaataaattttcttaaattaagtttttacattgtattatgatttaaattaaacataatccatatagaaccaaatactacaatgaaaataatgatgatcacaaataataaagtaatcagattccatctttcttctggatcaaaacttaaatgtaaaaaatatacgaaatgaataataatttgactaatagcacataacaagaaaataatgtaattaacttcgctgcaaaagaatttttctattgccaatagaaatggcagtgtagttaatagagaagaaaataaaaaacctaataaataagacttcatttctttattcatattaaagtttaaaaaactactcattaaatagctccatttaaataaacaaaagtaaaaacacaaatccatataatgtctaaaaaatgccaaaaaacactaaaacacaaaattctagttcgaatagaattagtcaaacctagtttttttatttgataaagaattgacaatatcaaaattaaaccgaaaaaaatatgtacaccatgagtggcaacaagagtaaagaaaatagaaaaaaaagcatttttatcaggaccaaagttttctataatcaattcataaaattcatgcacttccattaataaaaaaatcaagccaaatataaaagttattgttaaaaatgaataaatcatttttatacgtttctgattcattgcgataacaacaaacccacatgacaaagaacttaataataataaaaatgtttctaataaaatagaagataaattaaaaattttattactaattaaattaattgatatatttgaagagacgatagcataaacggcaaaaagaaccgcaaacataatacagtcgctcattaaatatatccataaaccaaataactttttagtttctgatattttatcatgcgtactagaattactatttaatatagtattattaaatttattttctatcattttaaacctgctttttgaatatttttccaatattgatgctcaattttttttatctcttctgctgatatagtatactcagtatcttcattaagactattgataaataaactaataataattgcaagaaaagataaaatacacaaccaagtaatatgccaaaccgctgaaaaaccaaaaaacaatgaaaatatgcttatcataaatcctaaacctgtatttttaggcatatgaatatcatgataattaatactattaattaatttattgtaatgttgtccttctttatttcgccaaaaatcgtctctatcttcaaccttaggaataatagcaaaattatatagtggagcaggtgaagaggtcgaccattctaaagtcctaccatcccaaggatcaccagttaaatctaaattgtgtcggcgttcttttattgaaataaaaaactgaataacttgacaaataatcccgataccaataaaacaagcgccaatagcagctatacataacaacatatgaaattcggagtcaatattttgacttaaacgacgagtcatacccattagacctaaaaaatacaagggtatgaaagcaagaaaaaatcctattatccaaaaccaaaaagcacgttttccccaaatttcatttagaacaaatccaaataatttaggaaaccaataattaataccagcgaaacaaccaaaaacaactccgccaattattacattgtgaaaatgtgcaactaaaaacaagctattatgtaaaacaaaatcagccggaggaacagacaataacacaccagtcattccaccaatagaaaatgttactaaaaaacctaaagtccacaatatagaagaatgcatatgcacccgaccttgatatattgtaaataaccagttaaaaatctttacaccagtaggaattgctataatcatagtagtaattccaaaaaaagtatttacatcagctcctgctcccatggtaaaaaaatgatgtaaccatacaataaaagataaaatagtaatagataatgttgcccataccaaagaaacatatccaaataatcgttttttagaaaaagtagccactacctctgaaaatacaccaaaaactggtagtactaagatataaacttctggatgaccccaaatccatattaaattcacatacatcattgcattaccgcctaaatcattagtaaaaaaatgaaaattaaaataacgatctaaagtcagcaatacaagagtaacagttaaaactggaaacgaaataactataagaatattagtacataaagaggtccaagtaaaaaccggcattttaaaaaaagacatacccggagctctcatttttaaaattgttactagaaaattaattcctgttaatgttgttccaacacctgaaatttgtaaactccaaatccaataatctacccctacacctgaactatattttataccagacaatggtggataagctaaccaacctgtttgagcaaattctcctattcccaaagacaaagtaagtaaaaccgcactgctaacatttaaccaaaaacttagattattaagaaacgggaaagcaacatcacgggctccaatttgcaatggtattactaagttcattaaaccaataaccagcggcatagctacaaaaaaaatcattattacaccatgagctgtaaatatttgatcatagtgatgtggcggtaaaaaacctttaaaacctgctgatgcaacaacttgttgagtacgcattaatatagcatcaacaaaaccacgaaataacataacaaatgcaagtattccatacataatagatatttttttatgatcaaccgtagtaaaccattcataccataaatatttccattttttataataagtaatagtcgatgctatgcataatgcaattaaaataatcgcaatataagtaatcattataattggttcatgatagggtatggcatcaaacgtcaattttccaaacattattctatttctccatattaaaatttttctttacaatttcatgcgaaagattttcatctaagataaaatgttttatagaatattggtttttaattttattaaataaattttttttaacacttgaaaaatattcaatagaataattttcatttggaatagatattatatcaaaagttttcattgtatttaattttatagatgatgcttgtactttttttacccaatctaaaaaagttgaattttttaaaacagatattgcggtgaatttcatattagaaaaaccgtgtccactgtaattagatgatattcctttatatttacctacatcattagcaattaaatttaattttgttgtcattccaggcatagcatatatttgactacctaaagatggaataaaaaaagcattcataacagaatttgaagtaattcgaaaaacaatcggtctattcacaggaaacataatttcattaattgtagcaatattataatctggataaataaataaccatttccaatctaacgctactgcgtctatttttataggattatttaaagagactatagattttttaggatctaatttatgagtataactccaagataaaaatgctaaaaaagaaactattataataggaatcgtccaaactacaatttctatttttttggaatcacaccaattaggcttgtatatctgattaacattagttgaacgatacttaagagaaaaatatatagtcatgaaaattacaggaataataataaataacatcattataaaagatattaatattaatgaatattcctctgtagcaattgttccatgagaattaagaagtggattgttgcatccattcagaaaaaaaaatattaatatcaatgataatgttttcataaaattattatagtttaaaaatatcattcaaaaacctcaaaaataatgtattttttattcaaatatctttaataatactgttattatcaaaaatttttataggaaaattattatcttataaaaagtaataatctgtgaaataattgaattattttttaaaaattgttaaaatttaaaattaaaaattacatttttttaaaaaatttatttatcaaaaaatacaatataatactatcaaaatagcataaaaaaattttatctattttttttattaataaaaaggacataatatcaattaatgactctagaaaaaataaaaaaatatttaatatctaaaataaatataaaatttattgaaatttatgacgatagccaatttcatcattactctaaaaaaggtcttacacatttaagaataattattattagcgatgattttattaatcaaacgctaattaatagacaccgaataattttttcaatgctatcaaaaatgatagaaaaaaaaatatattcgttaactttaaatacttacacattaaatgaatggaaagataaaaaacttaaaaagactagtaatgttaagtgtgtaaaaaaaaataatattttatgaatttaatcaaaatatttatgatcataatcatataatttttttaaaataattatacttaagatatataaaaacatttttaaaaatagtaaaaaatataaaatacactgataaaagtaatcgttttgaggtaataagatgaatttttttatggaaaaaaataaagatgcaggtcatcgtgttacaattaagatcccaaaaacaacagtcaataattctcttcttcaagaatttataaaaattagaaaaacaactaaaattaatggttttagaaaaggaaaaactcctattagagtaatacaagaaaagtatggtagtgctatttattatgatatatttaaaaaactaatgcaaaaattttttcatgaatttataaagacagaaaaaataaaaattattggttctccgaaattttatatccatcaagatgaagataaaaaaaaagaatattttgaatattctgtaatttacgaactatatccacaatttcaaataaaagatataaaacaaataaaagtgaataaaataaacgtcgaaataacagaagaagatattaaaaaaaacatagaaacaaataaaaataaaaaaaatatttggaatccagtcaacaaagcagttaaatcatatgaccgtgtaacaattaattattgtatttatgaaaaaaataaaaaaataaaaaaatttgataaagacaatattagttttattgtatctaaaaacacattgataccccaattaaattataaaataatcaatcattttgttaatgacattattttttttaaaataaaatttcatgcgtttcatccagaaaaagaactacaaaataaagatataacatttaaaataaaaattattaaaattgaaaaaaaacaagaattagaatcagaaaaaagtaataaaaaaaacatcacggaaaaaaaaacgattcaaacggactatcaaaccataaaaaataatcttcattcacaaatcaatataataactgataaatatttagaaaatcaaatcatacaaaaaatcgttgaaaaaaatattctattgctccctcctcttttatttcaaaaagaaataaaaaatttatataaacaatacacaaaacaatatcaagaagaaaattctaatattttagaaaaaaaataccacatgagtcttgattcagaagttaaaaaaagattgtattttcaaattataatagaacaaattattttaaataataaattatttgcagatgaaaataacatccaaaaattaatcaaaaaaatatcctcaaattataaaaaccccatggaaataattaaattatataataaaaataaaaatcttaaaaatactatgaaaaatatagaattagaaagacaagccatgttgttattaaaaaaaagtattaaaattgaaaaacaaaattggaattttgaacgctttttaaattataattgggcaagtcatgaagaattaatgctgtaattaataaaaatattttcttgtgatattataaatttttctaaaatattaatttttaagaaagataattaatattatttaataattaaaaagtaaaattaccagaaaagtaatattaaatatttttaggaataaaaatgctatacgatcaaattaaaaataataaaacaagttcatacgctactttcattcctatggttgtagaacagcattctaggggagagcgttcatatgatatatattcacgattattaaaagaacgaataatttttataacaggtgccattgaagataacatggctaataacattgttgctcaaatattatttttagaagctgaaaatccagaaaaagatatatttttatatattaattctccaggtggtattattacatcaggcatgtccatttatgacactatgcaattcgtcaaaccagaaattagtactatttgcttaggtcaagcatgttcaatggctgctttattattaacatctggagcaaaaggaaaaagattttgtttacctaattcaaaagttatgattcatcaaccactaggtggataccaaggacaagcttcagatattgctattcatgccagggaaataatggaaatgaaaaaaaaattaaataaattaatgtcatttcatactggtcaatctataaaaaaaataaataaagatacagaacgtgattgttttttatcagcaaaccagtctattaaatatggactaatagattttattttatctcagcgtcaataaaaaaaataaatcaataaaatttttactaaaatattttatggaaaaatatagaatctatttactcaaaaatataaaaagcgcacaaaaagaggttaaatatgacagataagagtaaagacaattctaaaagtcttctttattgttctttttgcggaaaaaatcaaaaagaagtacaaaaattaatagccggtccaaaagtatatatatgtgacgaatgtataaggttatgtaatgatattatcaccgaagaaactatcaaacaaaataatataactgatactgaaaataaaataaattacttacctaaaccacatgaaataaaaaaacatcttgataattatgttataggacaaaattatacaaaaaaagtcctctctgttgcagtttataatcattacaaacgtctttataattttaataaaaaaacagattcggttgaattgggtaaaagtaatatcttattaataggtcccactggaagtggaaaaacattattagcacaaactctagcaaaattattagatgtaccatttactattacagatgcaacaaccttaactgaagctggatatgtaggagaagatgttgaaaatgtaatacaaaagttactacaaaaatgtaaatataatgtaaaaaaagcagaattaggaattgtatacatagatgaaatagataaaatagcaagaaaatctgataatccatctatcactagagacgtatctggagagggagtacaacaagctctactaaagttaattgaaggaacgttagcttctattccacctcaaggcggacgaaaacatccacaacaagagtttttacaagtaaatacctcaaatattttatttatatgtgcaggcgcattttcagaattatctaaaattgtctctaaaagactggatgcaggaacggaaataggttttaaagctaacattaaggaaaaaaaacaaaaaaaatcagaagattttttattaaaacaagtagaacctgaagatttgataaaattcggtttaattccagaattcattggtcgtttaccgataataactatattgaataaattaactgaagatgcattagttaatatactatgcaaacctaaaaatgctttaattaaacagtatcaaacattatttgaattagaaaatgtaaaactagaatttaacgcagaatctattcaattaatcgcaaaaaaagctatgaataaaaacactggagccagaggattacgatctattattgaaggtatactacttaatataatgtatgaattaccatcaatggttaacatagaaaaaatattaattaatgagtctgttgtaaactctaattcattgccaaaaataatatatggaaaaaacaaatcaaaaaaagcatcaggtgaataaaaaaaacatttgatgatccaaaaaataaaggtagttagcttttattttgtcaaacgcttagtattaaacgtcaagcaaccatcccgatatacttggctgattataggtgcaacttgcatgttttattatatatcgtgcagtttttaaatattataaatatcgggaaaaaattcaactaaagagagagctctatgaattctgagcgttctgaacgcattacaattcctgttttaccattgagagatgtagttatatatcctcatatggtaattccattatttgtaggtcgtcaaaaatcaattaaatgtattgaaacatctatgagtaatgacaaaaaaattatgttgattgcacaaaaagaagcatctaaagatgaacctactcctaaagatttatttgatataggaactattagtgcaattttacaaatgttaaaattgccagatggcacagtaaaggtattgatagaaggattacaacgcgcccatattaaaaatttaacaaataacggagaacattttattgcggaagtagaattaatttcttcctccaatcttttagataaaaatcaagaagtattgattcgtacaacaatgaatcaatttgaatcttatattaaacttaataaaaagattccattagaaatattaaatgtacttaataatatcaaaaattcagaaaaactagcagacaccattgctgctcatatgcccttaaagttaaatgataaacaatcagtcttagaaatacgtaatataaatgatagattagaatttctaatggctattatggaatctgaaatagatttacttcaagttgaaaaaagaattaggcatcgtgttaaaaaacaaatggaaaaaagtcaaagagaatattatttaaatgaacaaattaaagccattcaaaaagaacttggtgatatggatgaaattccagatgaaaacaaaatattaaagcgtaaaattaaatcatcaaaaatgccaaaagaagcaagagaaaaaacagaattagaattacaaaaattaaaaatgatgtcacctatgtcagcagaagcaacagtagtacgaagttatatagattggatgatacaggtaccctggtaccttaaaacaaaaatcaaaaaagatctccaacaagctaaaaaaattctagatattgaccattttggtcttgaaacagtcaaggatagaatcctagaatacttagcagtacaaagtagaaaaaataaaataaaaggtcctattttatgtttaatagggccacctggtgtaggaaaaacatcattaggaaaatctatcgcaagatctacaggtagaaaatacgtaagaatagctttgggtggtataagagatgaggcagaaattagaggtcatagacgtacatatataggttctatgccgggaaaattaattcaaaaaatggctaaagcaaaagtcaaaaatcctttatttttattagatgaaattgataaaatgtctcgtgatataagagtagatccagcatctgctttattagaagtattagattcagaacaaaatatgaattttaatgatcactatctagaagtagattatgatctttcagatgtaatgtttgtagcaacatctaattcaatgaatatacctgcaccattacttgatcgtatggaaataattcgtctttctggttatactgaagatgaaaaactaaatatagcaaaaagatatctatacccaaaacaaattgaaagaaatggtctagaagaaaatgagataaaaattaccgattctgcgattattagtattattcactattatactcgtgaagcgggcgtgcgtagtttggaacgtgagatttctaaaatatgcagaaaagcagtaaaaaatttaatattagataaatctttaaaacatattgaaataaatagtaaaaatttaaaaaaattcttaggaattaaacgttttgattacggaaaaattcatggtacaaaccaaattggacaagttattgggctagcatggactgaagtaggtggagaattacttacaattgaaacaacatgtgtatcaggaaagggaaaacttacatacacaggttctttaggcgaagttatgcaagaatctattcaagctgcattgactgtagttcgttctcaagctgatagattaggtattaagaaagattttcatgaaaaacatgacattcatgttcatgttcctgaaggtgcaacaccaaaagatggaccaagtgcaggtgcagcaatgtgtacagctattgtttcatcattaacaaataatccagttaaatcgaatgttgcaatgacgggtgaaattactcttcatgggaaaatactacctattggaggattaaaagaaaaattattagcagcacatcgtggggggattaaaacagtattgataccctatgaaaacaagcgtaatcttgaagaaatacctaagaatataatcgaaggattaaatatacatccaattaaaaaaatagaagaagttttaaaattatctttagaaaagataccttatgtttaaataaagaccaatattaacataatataaataaaaaaaacttggctgacaaagaatcgtcagcctatatattttaatataataacaaaaacaacaatattttttattttacttaatatttaaaatatttaggatcgtcatatcatgacaaaatattcacaagcacgattaaatagtattatagttaaatttattttaggagtaattattttatctttgatattaagtactataagtatttatataaatagagattttgaaaaatacatagcaactgtcaatggtgaaaaaattagttttaatctcttcaaaaaaatgtattttattgaaagagaaaaacaaaaaaaaatactaggaaaaaatttttttaaatttagtcataatgaaaattttacaaaagaaacttataattatgttttatctcaattaattaataatgttcttttagaacaatatgcaaaaaatatgaattatctcgaagtcaatgataatacgataaaaaaaataatatacaattctcctatttttcaaaaaaacaataaattcagtaaagagcgatatttaaattatcttacatctataaattcaactaatcatgaatatattaatataattaaaaaaaaaataaacacagaaaatttaatacataccatttctaaaagtaattttattttaaaaaaagaagaaaaaaatattataaaactattatctcaaaaaagaataataaaaaaagcaattgttaaaatagatccttcaatctataaaaaaaatataacaaatcaagaagcacaaatttatttcaaaaaaaatcaagataatttttatattccagaaaaatttaaaattaattttgttgaattaaaaactgataactttaaaatacattgcgaaaataaagagatttatgattggtatataagaaatattacacaatactcaactaaagaaaaaagaagatatagtattattcaagtcaaaaataaacaacaagccatatcgatattatctagattgcataatacaccagaagatttttcaaaaatagctcaagaacaatcaacagatccaatttcatcaaaaaaagatggagatattggctggatatcaatagatcttataccagatgaaattaaacatgcaaatttaaataaaaaaaatcaaatatctgatgttattccctttcataatgaatttttaattgttaaattaaatgagactcaaattgggacacaaaaaaaaatatatgaagtatttgatagtattaaaaaacaaataaaacaaaaaaaatcattagatttatataatgaactaaaaaataaaatatctaataatcttaaaaacgatccaggaaaaattgagaggattcttaaagagaataacatattaattcaagaaactgattggtttgataaaaaatcaatacctaaagtattaaatattcctatattaaaacaattcatttttaacaaaaaactatttcaaaaagatacaacagtcaaaccgcagtttcattttattgttttaaaaaaaaatcaatcttttttaattaaaattaaaaaatttaaaaataaagaaattcaacatttcgaaaatgttaaaaaaaatattataaaaaaattaaggtttataaaagcaataaaagaaaccaaaaaaaaatcagaagaaattatttatgatttaacacaaggaagaaaaaaattatttaaacaatcaaatctttatttcactgatcctgaaattatatcacgttacgatctaagtgctattacatcgatagttttttctttacctcatccacaaaaaggtaagaaaatatatactttatataacgataaaaataaaaattttataattatatcactcgaaaaagtttacaatacaaatttctccgaaaaagaaaaaaatgttattcttgaatatttatcaagacataatactgaaataatttttaattctattctcaaagatttacgagaaaaatcaataataaaatatgaaaacatagtaaataaataacatatacttttagaaagttattcaatataagtatatttttttaaattcgaataactttataaaaaaattctaacttgattgaaaaaatatttattattaactataatatttttcatttttatttcaacgatatgaacatagtaaacgtaatttaattattattaatctcatatcttcttgtcaaagaaacataaattttaatattaaaaaataatatctttattcaaaactattaaaaaaataaatacctgatttaaaaattatattaatataatattctattagtctgataaaacccatatttctaaattatttaaagtaagtttaaatatttaaaattaatatttctattaatatctaatttaataacattgtttactattttaaaaaatttatttctataatttaaaataataagaaaaatacattttattcatactcaaaaaaagtagatctattttttcatgatacatatatataaaactgaaattaaaaaataaaatattaaaaaaagagaaaacatatttaaaaaaaaatatgtaataaaaagtagtattctaaatacaatatttcattaaaatactaaaaaatagacttaaaaatatttaacctctaaaattataacattttctacttaaattttttaatataaaaatagaaaaatttcttcaaatttatatcataagttaaagaataaacttctttggatacatgtatataatgtattaaataaattattaaattatatctaatcattaaaaacaagaaagatattgtatttttttatcaattataatctttaaattttttttattttatacaataaatgattatcattttgactatgaataaatcaaatgttatcaaaaaaattatttttagatcaaaaaaacaaaaacatttttatctaaaaataaacactttattgttaaaaaacccttttttaatatatctaaaccttaggatttttttgtgaaattgtttaatcagttaagatggttttttgtgcgagaatggaaaagatatttaggagcaattttattattaataattattgcaactttgcaattattaccccctaaaatagttggtgttttaatagatctaattataaaaaaaaatatgcatggcgtacaaatattaccgtggattttaattatttttttagtagctgtaattgtatatatattacgatatttatggagaatactcttatttggtgcttcttatcaattagcaacagaacttcgagtaaaattttatacttatcttagtcagcaaagtcaaatattttttttaaaaaatagaactggagatttaatagccagagcaacaaacgatgttgatcgtgtagtttttgctgcaggggaaggtgttctaacacttgttgattcattggttatgggcttttctgtcttaatagtgatgagtactcaaattagttttttgttaacaataatttctttaatacctatgccaataatggctatattaataaaaaaatacggaaaagaattacatgaaacttttcgtcatgctcaaatatctttttctttattaaataatcaaacacaagaaatattaacaagtattagaatgattagagcatttggcttagaaaaaaatcaatctaataaatttaacatcattacaagaaatacaggaaaaaaaaacatggaagtagctaaaatagatgcacgttttgatccagtaatttatttgtcagtagctttttctaatttattagcgattatcggtggaggatggttggtatggaacaatcagattagtataggacaattaactagttttattatgtacttgggattaatgatttggccgatgttagcacttgcatggatgtttaatatagttgaaagaggcagtgcagcttgggatagaatacattcaattataaataaaaaattatacattgaagatggaaagaacaatatcccaccatatcccggtatattgaatattaatattaaaaaattctactacccaaataatcaaaaaccatctttaaaagatatacgcatccttataaaacctggaaacactttaggtatttgcggccctacaggatctggaaaaagcactttgttaatgcttattcaaagacaatttaattttaaaaaagaagaaatacattaccattctttatcattgctagaaataaaaatcgacgattggagaagaagaatcgctgttgtaaatcaaacttcttttttattttcagatactatatctaataatatttctttaggaaaacctaatgcgtctcaaaaagaaatcgaggaagtagcaaaattagctgatgtacataaagatattatcgacttgccagaaagatatgaaactcaagtaggagaacgtggtgtaatgttatctggtggtcaaaaacagcgtgtttgtattgcaagagcactattgttaaatgcagaaatattaatattagatgatgcactctctgctgttgatgctcaaactgaaaataatatcttgaaaaatattaacgaatggaaaaaaaagaaacattcattgatcattacaacacatcgtctatcagcattaattaattcagatgaaattatagtaattaagagtggttccatcatacaaagaggaaatcatttaaaattaattcaagaaaaaaattggtataaatctatgtactattatcagcaatcagaaatagaacttgaggataatgaaaaaacaggtgaaaaaaatttataacatgaatcatttaattgcgttctggccaattttaaaacgtctactaatttatgtaaaacctcataaaaaaaaattaattttagcgtttatttttcttttaagtggatcaacttcagaagttttaggcccaatcttgatcagttattttattaataatattttatctaaacatcaactacatttattaataattttaactataattacattatttataatattacaaatattatcagtatttttgaattattttcaaagtattttatttaataaaatagcagtagaaagcattaacaaattacgtcaagatgttatgtatgctgcattgcaacaacctattagcgaatttgattctcaacctattggacagatgatttcaaaagtaacgaatgatactgaagcagttaaagaactatatgacacagttggacctacattgtttcgaagtataatattaatttttattatattatttgcaatgtttactcttgaatggcatatggcccttgttgctttatttattttaccattagtcattacaattatgctggtttatcaatattatagtacgccacttttacggaaagtaagatattacttagctgaaattaataataaatttaatgaaacgattaatggaatgaatgtaattcagcaattctgtcagcaacgtagatttcaggaaaaaataaaaaaaagtagtgatttacattacatgtcacgtatgaaaatattaagactagacggttttttattaagaccacttctgagtttattatcttctatgatattatgtaacttcatgttcttatttagtttttttccagttggagcttttgaagtaggtgtactatatgcgtttattacttatcttggacgactaaatgaacctttaattgctattacaatccaacagtcagtattacaacaatctattgttgcaggagaaagaatattttcactaatagattcgccaaaacaaaaatatggaaaaaataaagatttattaaaaagtggaaaaataaatattcaaaatgttagtttttatcataaaaactgcaataaaaatatactagaaaatattaatattaaaatttcctctaaaagttttgttgcatttgtaggacatactggtagtggaaaaagcactttagcaaatttaatcatgggatattatcctctaaaaaatggaaaaatatatttagatgacaagtctattgattcaataagtcatagtgttttaagaagaaatgtattaatggtacaacaagatccaatagttctctctgatacttttttttataatattacattgggaagaaagatacctgaagaaaaagtttggaatatattagatacggttcatctttcagatttagtcaaatcgatgcctaaaggtatttattcccttctaggagaagaaggtaataatttatctgttggtcaaaaacaattattagcgattgctagagtattggttgcatatcctaaagtacttatattagatgaagctactgctaatattgattctggaacagagcaattaattcaaaaaacactattatcgatacgaaaaaactgtactttaataataatagctcatagactttcgactattatcgaagcagattcaattatagttttaaaaaaggggaaaattgttgaatttggtactcatgaacaattattaactaaaaaaagttgttattataaaatgtataaatttcaatcatgtaaattttaggagtttctgttagctttatcagaacacctgtatcaattgatttggctgcttccttccgaatctgaccaactattcaatattgcagtgtttggagctaacagataactctttatttatattttcataataaaaaattagattttttattatatagatgaaatttaaaatttacaaccaatatttatttttaaaaactatatttcaaaaatatttgaaaaatcaagaagagtactttcacaatacaattaatattgatagcataatagttttttaatgaaacattatgaaatttatatgaactatcaaatattagcacgaaaatggcgtccacaatattttagagatataatcggtcaaaaacatattgttactgctatatctaacggattatctcttggtcgtattcatcatgcatggttattatctggtactagaggaatcggaaagactactatcgctcgcttacttgctaaaagtctaaattgtcaaaatggaatcacatcagatccttgtagacaatgtattatttgtaaagaaatagaaaaagggttatgtttagacgtaattgaaatagatggagcttctcggactaaagttgaagaaatgcgagaaattttagatagtatttattattctcctattaaaagtcgttttaaagtatatttaattgatgaagtacacatgctttctcgtcatagttttaatgcacttcttaaaactcttgaagaaccacctgaacatgttaagtttgttttagcaactacagatgtagacagaatccctaaaactattatctctcgttgtttgtattttaaattgcaaataatatctgaagaaaaaattttcaaatttttaaagtatattttaattaaagaatctattgatacagatgaatattctttaaaaaaaatagcttatcatgctcatggaagtatacgcgatgcacttaatttactagaacatgctataaatctaggaaatggacatgttaatataaaaaatgtaacagatatgctaggacttctaccagaaaaatattcttttttgttaactgatgcggttttaaaaaaagattcaaaaaaaacaatgttgttgttaaataaaattagtagtataggagtagaatgggaagaaattttgatagaaatgttacgttttttatatcatatttctacatcgcaatcttttccattagtttgggaaaaaatttttaccgaaaaatacaaaaatcaaattcaaaaaatagctcaaaataataaaaaaactaatattcaattatgttatcaaatactattaaatggaagaaaagaactaaagtttgctccaagtcaaaaaataggagtagaaatgtctttattacgtgttatttctgcaatataaaaaatataatattaatataaaaacatataaatttaacaagatcataaaagatatgaaataattaatatttcatataaaaacatattgaaagtatttgatatgtatatttaactgataaaaaaatatccaatacagtataataaattgataatataaaaaaatgcacatgataaaaaataatatatatagtaattttaacaaatcattaaataaaacatatagataaaaaaaatagaaaattatttatttttaaaataaaatttttggcataaaaaataaaaaatatgactttcacattacaaaaaagagatcaatatatatgtttactaaaggtggtttaggtaatttgatgaaacaagcacaacaaatgcaagaaaaaatggcaaaaatacaagaggaaatagctcaaatggaagtgacaggagaagctggcgctggattagttaaagtgacaattaatggtgcacataattgtagacgtgtggaagtagatcctagtttacttcaagacgataaagatatgctagaagatttagcagcagccgcatttaatgatgcgacaagaagaatatctgaagtacaaaaaaagaaaatgtctgctatatctacaggcatgcagcttccaaatggatttaatatgcccgtttaaataaaataaagtaaaaaaattatatatgcgaaataagtataaatttattgaataaatttatttttactatgataattttattcaaaagtactttttatacttttaaaattacttttattgttaatttaaaaagaggtctttctgcatgaaaacacaaaaaaaagaagtttataattttcaatcagaaacaaaaaaattattacatttaatgattcattcactatattctaacaaggaaatttttttaagagaattgatatctaattcatcagatgcaatagataaattacgatttgaatctatatcatcaccagaattatatgaaaatgatagtgatgtaaaaattcaaatatctataaataaagcacaaagaacattgatcattagtgataatggcattggaatgacaaaagaagacaccattgaaaatcttggaacaattgctaaatcaggaacaaaatcatttctccaatctctagaacaaaaacaaaataaaaaaaatgaattaattggagaatttggcgttggtttctattcatcttttattgtatcagaaaaagtctcagttagaactagatttgctggtttagaatctaataaaggaatattatgggaatcttcaggagaaggagagtacaatattacaaatattgtaaaaaaaactagaggtactgaaatcactctatttttaaaaaaagaagaagaagaatttttagaaacttggcgtataaaaaatataattagtaaatactctgatcatattactattccaatacatatacaagattatgataaaaaaaataaaacatatttttgggaacaaattaataaagctaaagcattatggacattgaataaatcctctattacagaagaagaatataaagatttttataaacatctcaccaatgatcaaaatgatcctcttatatggagtcataatcacgtagaaggcaatcaagagtatattagtttattatatattcctgaaaaagctgcttgggatatatggaatagagataataaacacggtttaaaattatatgtaaaacgtgtttatattatggataattctcaagcctttcttcctaattacttacgttttataaaaggtttaatagattctagcgatttaccattaaatatttctcgtgaaatattacaagataattctattacagaaaaattaagaaaatcactgataaaaaaatctttaagtatgttagaaaaactagcacagaaaaataatgaaaaataccaaattttttggaatcaattcggtctcgttttaaaggaaggtcctgcagaagatcatgaaaatttaaacaaaattgctaatctattacgttttacatcaatgaaaagtaataattccgaacaaaagatgtctttaaaagaatatatatcaaatatgaacgaacaacaagaaaaaatatattacattactgcagatagttattcgtctgcaaataacagtcctcatttagaattatttaaaaaaaataatattgatgtattattattatcggatcgaattgacgaatggatgatgaattacctttctgaatttgaaggaaaaaagtttcaatctattagcaaagaagatatttctctaaataagctgacaaaagaaaaaaaaataaaaaacaaagatgtttcaacagaaatgattgaatttttaaaaaaagttaaaaacatacttggcaaccaagtaaaagatgtaagattaacacatagattaacagaaactccttgtgttttacttagtgattctaccgaaatgactacacaaatggctaaacttttttctgcagcaggacaatctgtgccagagttaaaatacatttttgaaattaatccggatcatattttaataaaaaaaatatgtactattaataatgagaatgaattgcatcaatggattaaattattattagaccaggcattattagcagaaaaaggtaatttagaaaatccacataaatttatttctagaatgaataaattacttattaaataataaaaaacatgattactactattatattagtagtaatctttagattaacttatacaaacataagaaataaatatgcgtattattttgctaggagcacctggaacaggaaagggtacacaaggaaaatttattacagaaaaatataaaattcctcaaatatctacaggtgatatgctccgagaaagtgttgtgttgaaaaataaaataggaatgattattaaaaatattattgaagagggtaaactagtctctgatgaaattgtatgtcatttaataaaaaatagaattaaaaaacacgactgtatcaatggttttatattagatggttttccaagaactatccaacaagctttgtacttatcaaaaaaaaatattaaaatagattatgtattagaattcataattccacatgaatatatattagaacgtatatcaggaagacgcatacatatacaatcaggacgtatctatcatgtaaaattcaagcccccaaaaatcaaagacaaagacgatctaactggacaaactttaatcacaagaaaagatgatacaaaagagggcattaaaaaaagattagaagaatacaaaaaagtacatgatcctttagtacaatattatattcatgaaaaaaaacggggtaatataaaattttttcaaattgatgctatgctttcattttcatctattagaaaaaaattagaaacaattttaaaaaaatagtttttgcgttctacaggatttgaacctgtgacctacggcttagaaggccgttgctctatccagctgagctaagaacgcataaataattagattaaaatctaacactaatataatatatatgcaactaaattactatgaatattattaaattttgatatatttaatcatactattaaaaatagtaataatattttagtatataacatataaaaaaattgagttacttactgatgccagcaataattatagatggtaataaaatagcaaaaaaaatagaactaaaaattttaaagaaggtaaaacaaagaaaaaaaaatggagaaagaatacctggtttagctatgattttagtaggaaatcatattccttctcaaatttatgtaaataaaaaaaaaatatcatgtaaaaatgttggttttttttcagaatgctggaatttacctagtaatatcaatgagaaagaaatattaaatattatttctaaattaaatgaaaataaaaatatagatggtattttaatacaattacctcttcccccacaaataaatcacatgaagattttaagtagtattgttcctgataaagacgtagatggatttcatccttataatacaggttctttatgccaaagaacgccaaaattaagagcatgtacacctaagggcattattacaatgttaaaatataataagataaaaactcatggattacatgcggttatggttggagcatctaatatcgttggaagacctatgagtttagagttgttattagcaggatgtacaactactgtcacacatcggtttacaaaaaatttaaaagatcatgttcagaatgctgacctattaattgttgcagtaggaaaagcaaattttttaaaaggcagttggattaaaacaggatctatagttatagacgtaggtattaacagattaaaaaatggaaaagtagtaggtgatgtagaatttaaaactgcatatctacgagcatcttacattactcctgtaccaggtggcgttggtcctatgacagttgcaacattattacaaaatacattagaagcttgtgaaaatcatgatgatatttaagattttttatttttacgccatattgttttatcaggtaaatcttctaatattatatctaaagacatgagtttttttcgtatattatctgcttcttgccataattttgattgtcttgcaatatttcttttttctattaataattgaatttcttttagtgtgagtaaatttaatgtagtttttttttgtaagaactcttttggatcctgaaataaaaaacctaaattatttgctaaatattttaatctaaaagcaaatttatttgtttttaatatgtctttattttttaaaaaattaattttacgtgctattttaaaaaaaatagaaaatactgcaggagtattaaaatcatcattcattgcattataaaattctaattcaaaattaaggccttcttcgttattaaaaaaaggattagtatcatacaatgctgtgtataaatattttaatgaagtatatgcttgatctaaatttttttcacagtagtaaataggatgacgatagtgtgttgaaagaaaaaaataacgtaacacttcagcatcacaatcctttaaaatatttcttaaaaaataaacattacctaaagatttagacatttttttattattcagtataaccatgccagtatgcatccaaaaattgatcatcgatttattattaaaacatatagattgagatctttcattttcatgatgagggaaaagaagatcagagccgcctccatgaatatcgatagaattattaaaaaaaacattagttatagcactgcattcaatatgccaaccaggacgtccctttccccatggagaatcccaagaatattcttctttattagaagatttccaaagtataaaatctaatggattttttttcatattatttaaagggattcgtgatccagattctaatgatgttaaagactgacgagataaagtcccataattaggatcactatctatagaaaaaataacatcaccatttttgtgaatatatgcatgttttttctttattaacgttgtaattatcctaataatattatcaatataatctgtaacacgaggttcttcatcaggaacagatatacctaataaatcaaaatctttatgcatttcttttatcatagaagcagtaaaagtattaattttctttttttctttagtagattttgaaataattttatcatcgatatcagtaatgtttcgaacatatttgacttgaaaaccagaaaaacgtaaataacgaactatcatatcaaaaactacgaaagtacgtccgtgtccaatatgacaaaaatcataaacagtaacaccacatacatataaattaactctattctttttaataggggtaaaaatttctttcgtactagttagtgtattaaaaatttttaacataatttgtatcccgtaaaaatatatttaaagaaaataatataaatatattattttctatattaccaatgtgctaaaatgattaaattattttttactagaaatttttataaaattttattttttaaataaaaccatacaattatttataaaatttatgaaattaattataaaatacataataaaaaattaatattatgacaaaattttatgttttgaaagaataataaaatatttttttgtaaaaaaaataggggttaataatgaaaacaaaattgcgagaaatgttaagattcccttgtttttttacttataagattattggtttagcgcagcctgaactgatcgatcaaataattaaagttattcaaattcagattcctggagactacactcctcaagtaaaatcaagtaatagaggaaactatctttctgtttcaattacaatatgtgctaaaaattttgaacaaattgaatgtttatatcatgaaattagtaaaattaatatagtaagaatggttttataaaacatcaaaatatatgtgaaatattttgtactaatatggtacagctctctttaggagctgtactataaaacatatttgtttttatattaaaaacaattgaataactttataaactaataacattagcggcagatggtccttttgctccttcggtgatttcgaattcaacactctgaccttctgctaaagttttaaatccattgctttgtattgctgaaaaatgaacaaacacatccttactaccgtcttctggagtaataaaaccaaaacctttagattcattaaaccacttaacattacctttaatcttggacatctatattaccttacatgaaaaaatatactacattgaaaaaagtattaatcaacaattacttatgattaaaaatcaaatataaaaaaatttaaattctcaatagattaacatgtaaatctattcttagctagaaagtaatttgattttaaaaatatttgtataaaatttaataagaatatttttatttttaataaatactatactattcataaattaaaatagtaatatattttaaaaaataatttatttcaagtataaaaaaacccgaaaaaaatttcgggttttttttcctggatttgacctactctcacacggggaggccccgtactaccatcggcgttatagcgtttcacttctgagttcggaatggattcaggtggtaccactacactatttttaccaggaatttaataaattttttatgttattaaaatatgcttttttaataaagcaacaaattcagtaaaaacaagcttttttattaagtttattttaaaaacacctctggtgttgtaaggttaagcctcttgggtcattagtactagttagctcaacatattgctatgcttacacacctagcctatcaacgtcgtagtcttcaacgtcccttcagtaaacatttctgtttcagggaagattcatcttggggcaagtttcgtgcttatatgcgttcagcgcttatctttcccgcatttagctaccgggcaatgccattggcatgacaacccgaacaccagtgatgcgtccacttcggtcctctcgtactagaagcagcccccctcaatcttccaacgcccacggcagatagggaccgaactgtctcacgacgttctaaacccagctcgcgtaccactttaaatggcgaacagccatacccttgggacctgcttcagccccaggatgtgatgagccgacatcgaggtgccaaacaccgccgtcgatatgaactcttgggcggtatcagcctgttatccccggagtaccttttatccgttgagcgatggcccttccattcagaaccaccggatcactaagacctgctttcgcacctgctcgcgttatcacgctcacagtcaaactggcttatgcctttgcactaacctcacgatgtccgaccgtgattagccaatcttcgtactcctccgttactctttgggaggagaccgccccagtcaaactacccaccagacactgtctctgtgccggattacggcactaggttagaataccgaattttaaagggtggtatttcaagtttggctccattaaaactagcgttttaacttcatggcctcccacctatcctacacattaaaattcagaattcagtgtcaagctatagtaaaggttcacggggtctttccgtcttgccgcggatatactgcatcttcacagcaaattcaatttcactgagtcccaggtggagacagcctggccatcattacgccattcgtgcaggtcggaacttacccgacaaggaatttcgctaccttaggaccgttatagttacggccgccgtttaccggggcttcagttcagagctttaagtttcctttgactccttcgattaaccttccggcaccgggcaggcgtcacaccgtatacttccactttcgtgtttgcacagtgctgtgtttttaataaacagttgcagccagctggtatcttcgactaacttcagctataggagtaaatcctttcacttaacattagcgtgccttctcccgaagttacggcactattttgcctagttccttcacctgggttctctcaagcgccttagtattctctacctaaccacctgtgtcggtttggggtacgatttaattttacctgatgcttagaggcttttcttggaagcgtggtatcagttacttcatcaccttaatgattcgtcatcatgcctcagattaaagataatcggatttgcctaattatcatacctacacatttaaaccaggataaccgtcacctggataacttaaccttcttcgtccccacttcgcagtaatattaagcacaggaatattaacctgttgtccatcgactacgcttttcagcctcgccttaggggtcggcttaccctgccccgattaacgttggacaggaaaccttggtttttcggcgagcaggtttttcacctgctttatcgttactcatgtcagcattcgcacttctgatacctccaatatattttacaatatatcttcgttggcttacagaacgctcccctacccagcaaaaatataatttttgctgccgcagcttcggtgcatagtttgagccccgttacatcttccgcgcaggccgacttgaccagtgagctattacgctttctttaaatgatggctgcttctaagccaacatcctggctgtttatgccttcccacatcgtttcccacttaactatgactttgggaccttagctggcggtctgggttgtttccctctccacaacgaacgttagcacccgctgtgtgtctcccgtgataacattctacggtattcggagtttgcatcggtttggtaagccgggatggccccctagtcgaaacagtgctctacccccgaagatgaattcacgaggcgctacctaaatagctttcggggagaaccagctatctcccggtttgattggcctttcacccctagccataggtcatccgctgatttttcaacatcagtcggttcggtcctccagttggttttacccaaccttcaacctgcccgtggctagatcaccgggtttcgggtctgtaccctgaaacttaacgcctatttaggactcggtttcccttcggctcccttattaagttaaccttgctacagagtacaagtcgctgacccattatacaaaaggtacgcagtcacaaattattttaaaatatgcttccactgcttgtacgtacacggtttcaggttctatttcactcccctcgccggggttcttttcgcctttcccttacggtactagttcactatcggtcagtcaggagtatttagccttggaggatggtccccccatattcaaacaggatttctcgtgtcccgctctactttttgaatccacaatataaaatattttgtatacggggctatcaccttgtatcgctgaaatttccaaatcattctactataatttatattgattttgattctgggctgttcccttttcgctcgccactactgagggaatctcggttgatttcttttcctcaaggtacttagatgtttcagttcccttggtttgctttattaacttatttgattcagttaataatgatgcaatattgcatcgggtttccccattcggatatcgacggttattgcgcttcatatcagcttgccgacgcttttcgcagattagcacgtccttcttcgcctctgactgccaaggcattcaccatgtacgcttatttgcttaaccttacaacccacaggtgttttaaaaaaataagttatatgcttgtttttccgaatttttaaagagctttttgtgttaaatgttaacttttcttttaaagttattttgaggataacacaataatttaaattagtatataatatttttataaatattttttatttatcgtcccctaggggatttgaacccctgttgccgccgtgaaagggcgatgtcctagacctctagacgaaggggactattgaataaaattattttttaatttaacgatataataaataacagatcaaaaaaaaagagtcaagtgatttctgtattattagttaaaatattaaaaaaatatgaaaaaattagtaaattaagtttgattgtttattattttaaaaaaattatttatttaaaagatcaataatataatctatttctggaagcacattatgccatagaaaaaaagaatgggctgcttgaaaaactaacatacctattccgttagaaaaaaaattagatcctgttttacgagaccaatcaaaaaaaaatgtattatctgtttgataattcatatcataaaagcatgtcttagaagatacgcaagaaaaaggaataaaattatctttatcttgaataaaatgcgatgttgcattaataatcaaatcaaaagattttacatgtaacgaatttgtattaaaaacatttatatttccgtatttatggaattgtaagactaatttctcggcatttaaaacagttctattaaaaatacaaatcgaacacccatatgataaaagaggaaaaagaacacctctagcagcaccacctgcaccgattatcaatattgaataatttttttttataaaattcaatcttattaaatccgataacaaaccaattccgtctgtattatctcctaaaatattacaattatctatttttttcaacgtattaacagattgagcaacttctgctcttttagttaacttattacaaaaaaaataagcttcttgtttaaatggtgcggtaatatttgcacctcgaccgtcttttttaaaaaaatcttgtaaaacagcatacaagctatttaatggaacattacaagatttataaaaatgagaaatacctgtctgttttgaaaataaactatgaatttcaggagatttactatgatttataggatttccaaatacagcataattaaaatttttgcatttaaacataacgaattaactttccattaataatattaataatcttagaaggatttttttcatttcctatctttccattcaataatggaaaatctttaccaaaacatttaaacacttcttcagaagtaaaacatggcgtcatatttgaaatattagcactggtagatacaactgcttgtccaaaagcattacataattttattatttcaaaatgggcacttacacgtacagccacagtattaaatttaccagtcaaccaataaggagtattaggtttagctggaagtaaaaaggtaaatggtccaggccaatgaaaaaaaattttctttttttgtttatttgataaaatattttcattgacatacatttttatttgatcaaaatctgaagctactaatatcaatcctttttctatacttctattttttaaattaagcaatttttttacagcttttttactattaggatcacatccgagtccgaacattgattctgtaggatatgcgatcacatcatcattatgtaacatttttatacaatatagtagtgagtttaaaaaacaatgtttatccattaacatcttcttataaaaaattattattgtttgcttgactataagtaatattttaatgaattatgtcttctttaaaattaaataataaattttcaagcttatgatatgctgattcacacccaggtacattaaataaaacgattaatacgatccattttaaatcttcaagattcagttcattaatatctaattccatgattctttcaataattacttctcgtgtatctaatgtcaatatctccaactgttctaaaaaaagaataaaaccacgacaatcgacatttaattttagtgattcttcttgtgtataaattcgaatggtaatcttattggataatggattaatagatggaataatatttttcttgtaacaagaaagattttttaaccaacttaaagcattataaatatctcgtctttgaaaacctatatcagacaaatcattagtcaaactatcataatcaatcgatattcttgattcgttatgtatataattttcaaacaaatatattaatatatcaaacattacgtcctcaattatatattaaaaaatttaaatattgagtaatatattctataaataagtttattgtgagtattattaataatataatatgaaaaatattgtaatataatgaaaaaaatttttactaaaaaatataataagtttttattaaaaatataaaaaataatagcactaaacttttaattataataaaaaagtctatactaatacataaaattcaactattttatatctaaaatatatatgtctttgttaaaaatactctattatcctgatatacgtttaagaattcttgctaaacccgtaaaagaaattaataaaaaaatacaaaaaatagctaatgatatgatagatacaatgtatcaagaagaaggaatcggtttagctgcaactcaagtaaatattccattgcaaatcatagtagttaacacaatggaacaaaaaaaaaacaatttagtacttattaatcctaaaattatcaaaaaagaaggtgatattagtattgaagaaggatgtttatcaattccagagtatcaagcttctattccaagatctaattatatacaggtgcaagcagtaaatcttgatggagaaaaaatagaaatagaagcaaaatcaatattgtctatttgcatacagcacgaaatagatcatcttaaaggaaagttattcattgattatctatcaaaatttaaaagagaaagaattcaaaaaaaatttgaaaaaattaataaaaaaaataaaaaattttccataaaggaataaaaaaaatttgaaaaaattaaaaattgtttttgctggaacagaatatttttctgctgaacatttacacgcactaatcacttcttcacatgatgtaatttcagttatcactcaacccgaccgttattctggaagaggacagaaaatcaccttttctccagtgaaaatattatctttaaataatggaattcctatttttcaacctgaaaatttaaatgatacggattttcaaaataaattattaaaacttaatgcagatatcatgacagttgtatcctatgggaaaataataccaaaaaaaatacttaatatgttttcaaagggttgtattaacgtgcatgcttcacttttacctagatggagaggagcaactccgattcaatcatcaattctgcatggtgataaaaaaacaggcattagtatcattcaaatgaatgatgaaattgattccggcaatataatgcactccatcacgtgcagcatatcatcgaaagatactactaaaaccctatctttaaaattgataaaaataggaatagaagcattactagaagtcttagaaaaaattatattgaacacagttatttataaaaaacaaaacgaaaaaaacgtaattttatcaaaaaaaatatacaaaaaagatgctttattagattggaacttatcagccgaaaaattagaacgtttaatacgagcatttaatccatggccaatctgttattttttatcacaaaataaaaatataaaagtatggcaatcagaagtaattcctataacacaaaataaccgctctgtaggagaaattatttcctataataaaaatggaattcaaatcaatacatcgcatcaaatattaaatattaaaaaattacaatttcctggaaaaaaaataatagatgttaaaaatgtgattatttctaaaaaaaaattatttaaaataggaactattttataaaaaaatatttaatttattttatattttttgttgaaatcatataaattaaaaaaaataagcaaacggtatatttccgtttgctttaaaattatattttttatattttaataaaaaatagtataaattttatttctttaaaatttcattttttttgttatttttcacacgatctactaattcaatataagccattggagccttatctccagatcgaaatccacattttaaaatacgagtataaccacctagtctactaaaaaaacaaggccctaattttttaaataatttcgctactattgcattatcacgaatacgagaaaaaactaatcttctacgtgaaacggtgtctattttagataaagtaataataggttcaacaatacgacgtagttcttttgcctttgataaagtagtttttatcacttcatgtgtaaataatgaacatgccatatttttcagcatggaattaagatgagtgctgctacgatttaattgacgaccactttttcgatgacgcataaatttacctcttcttatcaagttgttaatatataaaatataaattattcatctaaaatacttgatggaggccaattctctaatctcataccaagagataagctacgagaagctaagacatccttaatttcagttaaagattttttaccgagattcggagtttttaaaagttctacttcagttctttggactaaatcaccaatataatgtatagcttctgctttaagacaattagcagaacgaactgtaagttctaaatcatctactggacgtaacaaaataggttcaaattcaggtttttcttctttgaattcaggttcacgaatatctcttaaatcaacaaatgcttctagttgttctgctaaaatagtagctgctcgtcgaatagcttcttctggatcaatagttccgttagtttccatctcaataactaatttatctaaatctgttctttgttctactcgagcagcttctacattataagaaattcgattaattggactataacaagcatctactaacaaacaacctattggtcgcgaatcttcttctaaatgaactctcgaagatgcaggaatatagcctcttccacgttgcacttttattcgcattttaatagaagcattttcatcagttaagtgacagattacatgctgcggcttgatgatttcaacatctccatcatgtatgatatctgcggcagtaatagaaccaataccagatttatgtaatgtgagaagggtttcatcttttccataaacttttaccgctaacgctttcaaatttaacaatatttctaaaacgtcttcttgcactccctctttagtactatactcatgaagtactccatcaatttcaacttcagttaccgcacatcctggcatggaagataagagaattctacgaagtgcatttccaagtgtatgaccaaatcctctttctaatggttctaatgtgactttagtatgagtcgcactaatttgttcaatatcaactaaacgtggtcttaaaaaatccatgatagaattctgcatattttcctctctttaatagtaaactttattatttagaataaagttcaacaattaagtattcattaatttctgcagataaatcggaacgctcaggaaatcttttaaaaataccttccattttagttgaattcacttctaaccaaattggtttttctcgttgctctacaagttctaaagcagctttaattcgagactgatttttagatttatttctaatggaaatttggtcgttaggagaaacttgatatgaagcaatattaacaactttattattcaccatgatagacttgtgattaattaattgtcttgattcagaacgagtacaaccaaaacccatacgataaactacgttgtctaatctagattctaataattgtaataaatttgctccagtattgcctttcaaactagccgctagtttataatatattttaaattgacgttctaagacaccgtataaacgacgcactttttgtttttcgcgtaattgaatagcataatcagataatctaggttttcgaataccatgttgtccaggaggttgttctaatttacattttgattctattgaacgaagtcctgatttaagaaataaatcagtgccttctcgtcgacttaattttaattttggacctaaatattttgccattttattctccagaaattcctaaaaatcacacgcgacgttttttaggaggacggcaaccattatgaggaattggtgtcacatcagtaatatttgtaatacgaaatccagcagcatttaaagctcgaatagtagactctctacctggaccagggcctttaaccattacttctaaattttttataccataatcttttactatttctgcacaacgttcagcagcaacttgtgcagcaaaaggagtagattttcgagaacctctaaaaccagaaccgccagaagtagcccatcctaaagcattcccttgtctatctgtaattgtaacaatagtattattaaaagatgcatgaatatgagcaattccatctaaaatttgtttttttacacgttttcgtgttcgaatagacgttgaattctttaccataattaatcttacctaaattatttttttattggttttcgaggacctttacaagttctagcattagttttagttctttggccgtgtactggaagacttctacgatgacgtaaaccacgataacaacttaaatcaattaaacgtttaatgtttaaagttctttctcttcttaaatcaccttcaataacatattttgcaacatgagttcttagaagatcaatttgttcttcatttaaatctacaattttagaatgttcaggaatgtttgcaatggaacaaataaatttagaacgttttttacctattccatatatcgcggttaatgcaatcaaagtatgcttattttctggaatgttgatacctgcaatacgtgccatattataaaaccttataaatgtattttaaacaaatttataatactaaagataataacaatttatatttaaaaatattttaattgacaaaaatgattaaccctgacgctgtttatgcttaggatcattactacaaattactcttacaacattatttctttttataattttgcaactacggcaaagtactttcacagaagcttgtactttcatcatatttccttctagtataaaatatttaatttaaattagctttctttaacatagattcatattgattagacattattaatgtttgaatttgagttataaaatctataataactacaacaacaatcaataatgaagttccaccgaaataaaaaggaacattcatagcacttcgcataaattccgggattaaacaaataaatgtaatatataaagaaccaactaaagtgagtcttaacataatcttattaatgtattttgctgtttgttcgccaggtctaattccagaaataaaagcccctgatttttttaaattatctgctgtttcacgagggttgaataccaatcccgtataaaaaaaacaaaaaaacactattgcagatatatataaaatcaaatataaaaactgattaggttgtaaataaaataatatttttgtcaaccattcatgattcactttacaccaagatataatagtagcaggaaatagaacaatactagaggcgaaaattgcaggtataacaccagccatattaatttttaaaggtagatgagtacttggagtttcataaatacgacgaccttgttgacgttgtgcataatgtacaacgatttttctctgtcctctttccataaaaacaactaaaaaaataaccgaaaaaattaacaacaaaataaataaaaacaataaaatatgtaaatctccttgtcgtgttttttcaatagtatttccgatagctgaaggcaaacccgctattattcctataaaaataatgattgaaataccattaccaataccatattctgtgattaattcccctaaccacattaaaaacatagtgctagttactaaacttataatagcaattaaataaaaataaaaatcagtgtttattataatactacgaattccagctatattaggaagagtcatagcaatcccaatagactgtacaagagctaatattaaggtagcgtatctagtatactgattgattctatgacgtcctgattctccttcttttttaatttcagataaagttgggtataccaatgtcagtaattgaataataatagatgctgatatataaggcataatgcctaaagcaaaaatagaagcacgacttaaagctccaccagaaaacatattaaacatatcaacaatagtaccattttgattatttaatattttagataaaattgtagtatcaatgccggggattggaataaaagaaccaatacgaaaaacaatgatagccacgattagaaaaacgattctctgcttgagttcactgacacttgttttagtatttttaaaatttaatcctaatttcttaaccattatttaccgcttatccttcaacttttccaccagtattttcaatttcagaacgagcacctttactgacaagtagacctcgtattatcaaaggaactgttagttttcctgaaagaattatcttggcatatttaatattttttttaataatattttcttgttttaatacgttaagatcaataatatttgtagacaaatttgataaatctgataaacgaacttctgttgtaatatttttttttctggaattaaaaccaaatttaggaagtcttctgtataacggcatttgacccccttcaaaaccacgacgaatactacttcctgatctagatttttgacctttatgacctcgaccagaagtttttccgaaacctgatccgataccacgacctaatctttttcgactatgacgtgctccatttgctggagaaagagtgtttaaacgcatgtttctattcctcttgtatttttaaaatataagaaattttcttaaccattccttgaatagatggcgtatcttcacgtatgacagtatgtccaatataacgtaatccaagtccgattaaagtttttttatgcttaggcaatctacctatagcactttttatttgagtaatttttatatttttcattaaaaaaatttatcctaatatatctttaatacgtttatttcttttagcagcgatcatttctggagacttcatattaactaaaccattcatagtagctcgaactacattgattggattagttgaaccataagttttagctaaaacattatgtattcctgctacctctaaaactgctcgcatagcgcctcctgcaatgataccagttccatcagaagcaggtttcataaacacatttgatccagtatgagaacccttgagagagtgttgtaaagttttattgactaatggtatagtaatcatattacgtcttgcttgctccatagctttctgaatagcggcgggtacttcacgtgcttttccataaccaaaaccaacttttccgtctccatttcctactacagttaatgctgtaaaagaaaatattcgaccgcctttgacggtttttgatacacgatttactgtaattaatttttcttgtaaatcattgtgattttttttttcaatattagccattctataattttcgccttaaaacttcagcccaacttcacgtgcagattcagctaaaacttgtacacgcccatgatatttaaaaccagatcgatcaaaagaaacatgagatattccctttgaaagggcacgttctgcaataattttacctatttttgccgcagcttctttatttcctgtatatttcaaactacaatttatttttctttctaatgttgaggcaaaaaccaaaacttttgcttctttagaagaaatgatttgagcatacatgtgtcgtgaagtacgatgtactactagtcgaatagcacctagttttttgattttacaacgtgttttcatagatcggcgtatacgagaaattattttatttttattagaaaaaatcattttatttctttttagcctcttttatacgtacaacttcatttgaatatcgtatgccttttcctttgtaaggttctggtgtacgataagaacgcaaattagctgcaatctgaccaactaattgtttatctataccttgaataataatttctgtaggagataaattttctgcattaatacccttaggcaaatgatatgtaattatatgtgaataacctagcgacatattaattatattatcttttgttattgaaacacggtatccaaccccagataattgtaattttttactaaatttttcagacacgcctataatcatagaatttacgagagctcttgaagttcctgcttgtgcccaaccattagaaaaacctaaacgtggtgaaaaaattatttgattgtttaaaaattcaattttaactgattgatgaatagtacgtgaaagatgaccgtattttcctttaattgatatatcttgcaaatctaactgaacattaacgccagaaggaataacaattggacatttagcaacacgagacatgcttcctccattaagccacataacaaataacttcaccgccaagaccttcttgacgagccatacgatctgtcataacccctttagaagtagaaattacggctattcctaaaccggacattactttaggtagattatttttgtttttatatatacgcaaactaggcctactaatacgttgaatcatatctactactgacttcccttgaaaatattttaaaaatacttccaattctagtttagtatcacccgtaacattataatctttaatataaccttcttcttttaataattgaataattgatttttttaatttcgatgaaggcattttaacagaatatttatttgctaattgaccatttcgaatacgggttaacatatccgctactggatcttgcatactcatttttacgctccaaaacctgaaaaatattttaccaacttgctttttttaaaccaggtatttcacctttcatagcggcctctcttactttaatacgacttaatccaaatttacgcaaaaaagcatgaggacgacctgtttgacggcatctgtttctttgacgtgacggactggaatcacgcggaaaagattgtaatttaagcaccgcattccaacgctcttcctctgatatactcatattagaaataatattttttaattcatgacgttgtgtataaaatttattagctaattttacacgtttaacttcacgcgctttcattgattgtttagccattgagcaaccttatttttttacttgcgaaaaggaaaattaaaagcagataataataaacgagcctcatgattagattttgcagtagtagtaattgttatatccaacccgcgaacccgatcaattttatcgtaatcaatctcaggaaaaataatttgttcacgtattcctaaactataatttccttgaccatcaaaagagtgacttgataatccgcgaaaatcgcgaatacgtggaacagcaataataattaaacgttcaaaaaaatgccattttttctgaccacgcaatgtaactttacatccgataggataaccttgacggattttaaaaccagcaacagatttacgagctttagtaattagtggtttttgtccggatatagcagttaaatctaaaatagcattatctaaaatctttttatcagaagcagctccaccgacacccatatttaaagtaattttatcaattttaggaacctgcataacggaactataatttaattcatgcataagctgagttataacttttgatttgtaataatcatataatgtcgccatcatattactccaaactattgaatcgttttaccagtagatttaaaaaaccgaacttttctcccttcttcaaacctaaaaccaatacgatctgctttattagattcaggatttaaaatagcaatatttgatatatgaataggtgcttctttttctataataccaccacttttattttgagatggaactggtttttgatgttttttaattaaatttaaacctttaacaattacttgatttaaagataaaatatttttaataatacctgtttttcctttatcttttcctgttaatataacaactgaatcattacggcgtaattttaatgccattttttattccttaaaaatttcataactaaagaacttcaggagctagtgaaataattttcataaatttttctgttcttaattcacgtgtaacaggaccaaaaatacgagtaccgataggttgttcgttattgtttaatacaacacaagcattggtatcaaaacgaataacagaaccatcagatcttctaaccccttttttagttcttactactaccgctttaagaacttctcctttttttacttttcctctaggtattgcttctttaattgtaattttaattacatcacctatcgctgcatagcgacgacgtgaaccacctaaaactttaatacacatagcagatcgtgcgccagagttatcagctacatgaagaattgtttgttcttgaatcatatttttaaaacctcaattattctaattaaaaataatttaatcctcatattactgacattttatgaacataaaacatgagcagacgtgagtttgttcatgttttgatatttttttttaaaatactgttttttcaataatacgaactaggacccaagattttgttttagaaatcggacgagattctcgaatttctattaaatcacctacggtacattcgtttttttcatcatgaatatgtagttttgtagtccgtttaataaattttccataaataatatgttttacaaaacgttcaattgctacaacagcagatttttgcatcttattacttatcacacgaccttgtaaggttcgaattttttccattattttatctcttcctttgaatctagcaaagtctttacttgtgcaatgtttcgtcgaacttttcgtaataaatgaggttgttttaattttccagaaacagattgcatacgaagattaaattgttctctcaataattgtaaaagttctgtgtaaagatcttttttatttttttttctaaattctaccaatgccttcattacatcaccatcttatttacaaaagtagttttaattggcaacttagcagctgcaagtttgaatgctgcacgagattcttcttcagtaactccttctaattcataaagaattttaccaggttgtactaaagcgacccaatattcaacattacccttgccttttcccattctaacttctaaaggtttttgagttataggcttatcaggaaatatgcgaatccacattttgccttgtctttttatacagcgagttatagctcttcttgcagattcaatttgacgagcagttaaacgccctctatcaatagcttgcaatccaaaagtgccaaaattaatatcagtaccagacgctaaaccacgatttcgacctttatgcattttacgaaatttagtacgttttggctgcaacattattagcttctctctctttcttactttctatttttacgatactgcttttttgtttggacagaaggtttatctaatctttcaacagtttccattccacctaatatttcacctttaaaaatccaaacctttacgcctatcaccccatatgttgtatgagcttctgaaatgctataatcaatatttgcgcgtaatgtatgaagaggaactcttccttctctataccactctctacgagctatttctgctcctcctaaacgtccactaacttcaactttaatgccttttgcaccttgtctcattgcgttttgaacagatcgtttcatagcacgacgaaacattactcttctctcaagttgagaggtaatactatcagaaacaagtttagcatctaattcaggtttacgcacttcagaaatattaatttgaaccggcactccagtaattttagcaatagaaattcttaacttttcaacatcttcacctttttttccaataacaatacctggtctagcagtataaatcgtcactcgaatacttttagctggtctttcgataatgattctggaaattgaagctttttctaatgttttcattaaaaactgacgaactttatagtcactatctaaatgatccgcaaagtctttagtgttagcaaaccagacagaattccatttttttattatacccaatcgcataccattaggatgtactttctgacccattactgattctcctcgatgttaacgatcagacacaattacagtaatatgactagtacgttttaaaatacgatctgcacgtcctttagcacgaggcatcattcttttcattgttgaaccttcattaacaaatatttttttaattctcaatttatctatatctgcgccatcattatgttctgcattagctacagctgattcgactactttttttactaaaaaagcggcttttttattggtataagttaaaatatttaatgcttgtggcacttttttaccgcgaattaaatctacgatcaaacgcactttttgagctgaagagcgtgcttgacggtgttgagctaaagtttccatttactcctctttttatctttcgtgtttcttttaaattaacgtttttttactttcttatcagcagtatgtcctctgtaagtacgagttaaagaaaattcgcctaatttatgtcctaccatttcttcagtaacaaaaacagggatatggctacgaccattatgaatagatattgttaaaccgaccatattcggaaaaattgttgaacgtcttgaccaagttttaataggttttttatcatttatttttactgatttttctactttttttaataaacttatatcaataaaaggaccttttttaagagaacgtggcataaagtgatccctacaataattattttctgcgatgacgtaaaataaatttatcagtacgtttatttttacgagtctttttaccttttgtctgaataccccatggagtaactggatgtttaccaaaatttcgtccttcaccacctccatgaggatgatcaacagggttcatggctgttccacgaacagttggacgtatacctatccaacgagaagctcctgctttacctaaaacttttagcatatgttcagaattacctacttcaccaatagtggctctacaattagactgagtttttctcatttcacctgatcgtaatcttaaagtagcatactcttcatcgaatgccactagttgaacataacttcctgcagaacgagctatttgaccaccttttccaggttttaattctacattatgaacaaaagtacctactggaatatttttaagtggtagagtatttcctgtttttataggtgcacgcaaaccagaaattatagtatcacctatctttataccttttggagctaaaatatactttctttcaccatctttatataatattaaagcaatattagaagaacgattaggatcatattcaaatctttctacggtagctcctatatcatctttatttcttttgaaatctacaatacgatatgctcttttatgtccaccaccaatatgacgagttgtaattctaccattattattacgtcctccgcttttactcttttttcttaataataaagaataaggttttcctttatacaactcattattaacaactttaataacgtggcgacgacccggagatgtcggtttacacttaacaactgccattttttgtcctccgactactctgtattacctatgaaatctaaattacacccttttttaactttaatataagcttttttccaatgacttctctgaataatacgatttgattgacgctttttttttcctttaacttttaatgtttttatactatcaacatcgacatcaaatattttttttactgcatattttatttcatatttagtggcgttatttaatacttttaaaacaacggtattaaatttttccatagatatagatgttttttcagatacgtgtggagacagaagtattttaagtaaacgttcttcagaaatcatgaaagtatctcctctattcttttcactgcttcaacagtaataaccacatgatcaaaagcaatcaaactaacaggatctatagaatgcacatctttcacgtctactgaatataaatttctagatgcaagaaataaattattatctattttattagtaacaataagaacattttttaaatttatatcttttaatttctgtactaaaagttttgttttaggtgcatctaatgaaaaattctcaaaaactattaatcttttttggcgtattaattcagaaaaaatactttttaatgcaccgcgatacatctttttattaactttttgactgtgttcttgcggttttgcagcaaatgtaacacctcctgatcgccaaattggacttctaaaagatcctgctcgtgcacgaccagtgcctttttgacgccacggctttctacctgatccagaaacttcggcacgacttttttgtgctctagtaccttgacgggtagatgctgaataagcaataacgacttgatgaattagagcttcattaaaatcacgagcaaaaatgatttcagaaacactaagaacattttgtacgtctttaactactaattccatgctttactcctcactgctcaaaccttaatagctggtttaacgataagatcactaccggtagcaccgggaacagcacctttcaccaaaagaagatttctatgttcatcaatacgtactatattcaaactttgtacagtaacgcgagtatttcctaattgtcctgccatttttttgcctttaaatactctaccgggcgtttgattttgaccgatagaaccaggtactctatgggataaagaatttccatgtgttgcatcttgtgtatgaaaattccaacgttttactgtaccagagaaaccttttcctttggaaatacctgttatatcaacttttttgacattgttaaaaatgttaattgtaatactttgtccaattttaaaattgttatttttatcggttctaaattcccataaaccacgaccaggagttacaccagattttaaaaaatgtccggattgtggtttgtttaatctattcgatttttttattccagttgttacttgaatagcacaatagagatcagtatttatattttttacttgtgtgattctattttcttttaattcaattacagtgacaggaattgaagttccttcttcagtaaaaatacgagtcattccaatttttttgccaactaaaccaatcattgattgcacaccttaatcatgtctatctgattaacctaaactaatttgcacatccacacccgcagcaagatctaatcgcataagcgcgtcaacagtcttttcagtaggttctactatatcaattaagcgcttatgtgttcgaatttcatattgatcacgtgcgtctttatttacatgtggagatactaaaatagtaaaacgttccttacgagtcggaagaggaattggtccacgtacttgtgctccagttctttttgctgtttcaacaatctctgtagttgattgatcaattaatctatgatcaaaagcttttaaacgaatacgaattctttggttctgcatcacaccagaactccaattatttacacattgaaaatttaaccttctctgaataaatttatattactcaagagtagatgtaattaaatacgactatgtggcccctatatcaggagtgttgttttaaggtttacttgtctatgtaaaatataaattttttatgatttatttaaaaaaatataaatgtattattaatatatgaatttattaaaaaaaactaattagttgtttatactataatataatacatattaatcaagaaaagagcatcttatactcttttcttaataaattcaactttgatgttagtataaaatagcctaaatataaattattaaagtaaaactttagaaactacacctgctccaacagtacgaccaccttcacgtatagcaaatcgcaatccatcggccattgcaataggattaattaaagtaacagtcatttttatattatctcctggcataaccatttcgataccttcagggagttcaatggaacctgttacatcagtagttctaaaataaaactgaggacgatatcctttaaaaaatggagtatgacgcccaccttcttctttggatagaacataaacttcagactcaaatgttgtatgtggatgaatactacctggtttagctaaaacttgacctctttcaatttcatcacgctttgtaccacgaagtaaaactcctacattttctccagcgcgaccttcatctaacaatttcctgaacatttctacgcctgtacaagtagttttagttgtttttttaattcctacgatttcaacttcttcgcctactttaattatacctttttctactcgaccagttactactgtgcctcttcctgatatagaaaaaacatcttctattggcaataaaaaaggctgatctactgctctttttggttcagggatatagctatctaaaaatttagataaatcaattatttttgattcccattcaggatcgccttccaatgcttttaatgctgaaccacgaatgataggagtatcatctccaggaaaatcgtattgtgtcaataaatcacgaacttccatttcgactaattcaagtaattcctcgtcatctaccatatcacacttattaaggaaaacaataatatatggaacgcctacttgtcttccgagtaaaatatgttcacgagtttgaggcattggaccatcagttgctgctacgactaaaatagcaccatccatttgagcagcgcccgtaatcatattttttatataatcggcatgacctggacaatctacgtgagcataatgtctaaactcagtatcatattctacatgagaagtgttaattgtaatacctcttgctttttcttctggtgcattgtctatctgatcaaaagcacgtgcagaaccaccaaattttttagataaaacagtcgtaatggctgctgttaaagtagtttttccgtgatctacgtgaccgatagtacccacatttatatggggttttaaacgttgaaatttttctttagacatttttttttccttatataaaatatctgtttttaaataagaatattgtatacaatatagaattaaacttctacttttctcttctttcaataatatctttagaaatattaaatggagcttctatatattttaaaaattccatcgaataagaagctcttccttgagtttgagaacgtaaatcagtagcataaccaaacatttcagataaaggaacacatgcattaattattttactaatagacaaatctttcataccttcaataatacctcttcggcgatttaaatcacctataacatctcccatatagtcatctggcgtttctacttctactttcataattggttctaataaaattggttttgcttgtttaaaaccctttttaaatgccgcagaagctgctaatttaaaagctaattcagatgaatcaacatcatgataagaaccaaaataaagacgtactccaatatcaactacaggataaccagctaaaggtccgcattttaattgttcttgaattcctttatcaattgctgaaatatattcgctaggtataactcctccttttatatcattaacaaataaatatccttcacctcctggctgtaatggaaatagttctataacaacatgaccatattgacctcttccacctgactgtttaatatgcttaccttcaatatcttcaactttattaagaatagtttcacgatatgctacttgaggtttaccgacattagcatcgacactaaactctcgtttcatacgatcaataataatttctaaatgtaattcccccatgccagaaatgattgtttgattagattcttgatcagttcgcactcgaaaagaaggatcttcttttgctagtcgtcctaatgctaaacccattttttcttgatcaactttagttttaggttccacagaaatagatatcactggttctggaaattccatacgttctaatataatcggatcatttaaatcgcataaagtatcaccagtagttacatcttttaaaccaatagctgcagctatatctcctgcatatacttcttttatttcttcccttttattggcatgcatttgaacaattctaccaaatctttctctctgagactttgcagaattaaatacagtatctccggattttaccactcctgagtaaacacggaaaaaagtcaaattaccgacaaaaggatcactcgcaattttaaaggctaaagcagaaaaaggtgctttatcatctgaatttctaatagctggagtttgttcaacatcatttaaaatccccttgatatcctggatatcattaggagcaggtaaaaattcaattattgcatctaataatgcttgtacccctttatttttaaaagctgatccacaggtaatcaatacaatctcgttatttaaagctcgtttccgtaatgcagatttaatttcactttcagataatcgatctccgtttaaatatttttctaaaagatcttcattagattctactgcagactcaattaaattttgattccattttttcgataattcgatcatttccggaggaatatcgttgtaaacaaaggttacaccttgatcagagtctttccaatgaacagctttcattttaatcaaatcaacaacaccaacaaaagtatcttctgctccaattgctaactgtaaaggaacaggattagcacccaaacgtattttaatttgttttactacttttaaaaaattagctcccatacgatccattttattcacaaatgctatacgaggaacattatatttattcgcttgacgccatacagtttctgattgtggttgcacacctccaactgcacaatataccataacagcgccatctagcactcgcattgaacgttctacttctatagtaaaatcaacatgtccaggtgtgtcaatgatgttaatcctatggggtttgaattgtttagccattccgctccagaaggtagtagtagctgcagaggtaatagtaattcctctttcttgttcttgttccatccaatccatagtagctgcgccatcgtgaacttcccctattttatgattaattcctgtataaaataagattctttcagtagtagttgtttttcctgcatctatatgtgcacttataccaatattacgatatcgagaaataggtgttgtacgagacattatctttctcttatttttaggttttaaaaaattgagtctcataaactcaattgagataattgcctcaatataatttataagtaatacaaaaaacgatataaaaatctaatattatcaccaacgataatgagcaaaagccttattagcctcagccattcgatgtacttcttctcttttttttactgctgttcctttattttctaaagcatcataaagttcatttgataaacgtaaagacatagatttatcgacacgcttgcgggcggattctacaatccaacgcatcgctaaagcattgcgccgtactggacgaacttcaacaggaacttgatatgttgaaccgccaactcgacgagactttacttcgactgttggacgtacattttctaaagctatttcaaaagcttctaattcttttttatctgtacgtttagataaattttttaatgcagtatatacaataacttcggcaatagattttttaccatctatcatgagaatattaataaatttagctagtaattctgaagaaaactttggatctggtaaaatttttcgagtaccaataatacgacgacgtggcataaaaagctccatttaatgaaaagtataaaaagaaaaattttttatttttttggttttttaacaccatatttagaacgaccctgtttacgctctttaacacctgcacaatctaaggagcctctaacaatatgatatcgaacaccaggtaaatctttaacacgaccacctcgtattaaaataacagaatgttcttgtaaattatgaccttcacctccaatatatgcagttacttcaaaaccattagttaatcttacacgacataccttacgtaatgctgaattaggctttttaggtgtagtagtatatactctagtacaaacacctcttttttgagggctttttcccagagcaggaacgttacttttgatgacttttcttacacgaggtttacggaccaattgatttactgtggccataaaaaaactcctattatttcaatggatttttgaaaaattgtcaaaataatataaaataaaaaattattctttattatcatgaagaattttaagattggatatttaaattaaatcaaatttaactcagtattttttaccaagtcatttgttttttatgtttaagtgttaatgaaacgaaatggatataattgattaaaataaattctctagaaatattttttctgattcctcgcgcataaacatcttcttttataagatataatttcactggagacataattatactctttaaaaaaatattatcttttaatgcaattagcacaccatcttgaagagctaaaaaatcatctgatttttttaacatacttatcacaagagaaacattagtctcaaaaggagatttcattaaagtatgcaacatgtttatcaaccttaaaaattgataattgcgtcataattatctagttttaaacgcaaattatacgaatctaatacatctatattcagtataaaattattattattatttaatcctcgttcaagcaatgatgccttacaacaataaagatcttttatattatataaagatagtatagaaaaagaggaagtataattgcgagctaaaatatgttctggttgttggttttttattaattgcaaaacaccgtcaccaataaaaaaaacacttatttttttaaaaattgatgaaatgctaaaaatggcatccaaaccttctctacctaaactaatcccgtgtggtgcatgagaaaaaacaaaagctaccattttcattttaataaatataccaaattaaaattgtattatgcggtcacatatttttatagatttagctaattctattaaaccacttaattgaaaagaaagcgctaaattacccttcttaacattcatattaaataatttttcatcttctattacacctcttcttaaagctgcactattacaaacatataattttacttgatgttttttgtttaatccttgccatgcgttaatcaaattgaactcatcaatagctggtgtagtcatattattagcattaagtactccatcacaataaaaaaaaacactatgtaatatatgtttagtttttaataaagattgacaaaataaaaaagcagtacttgaattttgtgttccataaggtggaccagttactaatattgtataattcattttaaaaatcttgtaccaaaaacttagaaaattaatatttaattatatcatattttaaaatttaatagttattataagtatactatactccattaactacatctaatagttctatatcaaagatgagagtagaatttgctggaataccattaacttcttctgttccatatgccaagttgggaggtattactaattttattttaccgcctttctttatatattttaatccttctttccagcctaagataacatcttttaatcttagagatacaggtctacctcttttgtaagaattatcaaattccaaaccattaattagtgtacctttataatgaacagtgattttcgtctcgtcttttaatgcttctccttctccagctctttctaaaagatatagaagaccactagacgttttttttacaccctttaatttagaaaaatttttcatatataattctccttgaataaaattttcttttgcgttttttttcaattgaattttagtcgcatgttttaattttttttctagttcttttagacccgaagaaatatcttgatgcgagagttttaaatttccagatatagcatcttgtattccttttaaaagactattcctatctaactcgattcctatttttttttgtttttcaaaagtttggtttacataattaccgaaggatagacctaaaatataacctaacttttcattattattatgaaatgtattttttgtttctaaaacagattgcaaatgtatatctgatataggcgctgaaattgaaaaagattttggaacatataatatcatcaaaaataatattattcttttgaaaataaaaaaaatcatttataactccaaaaaacatgaaatgttaaatattttattatcaatatattttctatatagtatatttttttaaaaaatttttaaatatttttttaaaatacaacaataataaatattaaatactttctttcaaaaaaaaaaattaattcattttattattattttccctttaaatttaaaaaaatttttaactagcactgcaaaaaacatttacgagactgttgtgatgacaaataaaagacaagattcatagaaaaaataatatagaaatgagatgtcattaaagttcactaaaagatgataaaacatattaatcattttcgagaaaaataataatgataggagtctgattatgatcacatgattaattttgaagaaattattttttataaaataaattttcagtaatcgtaaaaataaaatttactcttttctagataaatatttttctaaagcacgataaaaacgtttcataccttcaataatatctaattctttaataattaatgaaggtgctaaacgaataacattattacctgctgtaagaaaaatcacaccttctgaaagtgaaaaatttaatattttatgaatattacgagaaacatttggttttaatacaataccaattaataaccctcttcctcttatttctgtaaataatttaaaacgtttattaataatatttaattcagatattatttttttagattttttttcgactccagacaaaacttttttagtgttaataatatcaataaccgattctgctaccgcacaagcaagagggtttcctccatatgtggtaccatgtattccaggcgcaattacagaagcaacttcatttgtagttaacatggcacttatcggaaacccaccgcctaaagatttagcaatagttaaaatatctggagtaatagcataatattcataataaaataattttccagttctaccaattccagtttgtatttcatcaaaaattaaaagtacattatattgtttgcataactcttttaatgcttgcacaaaagtgagatttgctggtattactccaccttctccctgaattagttctacaactactgcacatgtatcatgatcaattaaattttttacactattaatatcattaaatgaagcatgtactatacctgcaggttttggtccaaaattattagaatattttgattgacctccaactgaaacagtaaaaaaagtccgtccatgaaatgagttataaaaagaaataattttattttttttaaaattatatattttagatgagtaataacgtgctagcttaaaagcagcttcgttcgcttctgctccagaatttgcaaaaaatattcgtgatgcaaaactagaagaaagtagctttttagctaatctaagagctggttcattggtaaaaatgttactgagatgccataacattttactttgattttttaatgttttatttaatataggatgacagtgtcctaacgatgtaactgcaatacccccagaaaaatcaatatattcctttcctttttgatcccatatacgactgcctttaccttttataggaataaaaggaattggattgtaaataggtaaaatcaacttatcgaaattatcgcgtgtaattaaggttttttttgatatcattaaacttcctaaaatatatttgttacaataaaaatattattaaaaattattttgataaataaataagaaatttataaaaatttttaaaagaaaatatacattatattttattacaattaaacttattttcttgacaagaccaaaagaaatattaattttttatttaaatttaatgtgtaaaagagtatttttatataatacgcattatatatttaatttttatacaatattacataatatattgaaaaatataaaaaaaatataatatatataaattatatttttacgaaaatttatcagaaaaggtgataaaaaatgacaaacatcaatcgaataggacttacatggattagttttttgtcatatgcatttaccggtgcattagttgttgtcacagggatgataatggggaatatttctaattattttcatttatctatttctcagatgagtaacatatttacttttttaaatgcaggaatattagtatcgatttttataaattcttggttaatagaaattatatcattaaaaaaacaactaatatttagttttatacttactattatcgccgtaataggaatagttctatgtaacagtatatttttattttcaataaatatgtttatacttggattggtaagcggtattactatgtcaattggaacatttattattactcatctatattcaggatcaaaaagaggttctctattattattaactgactctttttttagtatgtctggtatgatatttccaattgttacagcgtatcttttagaaaaaaaaattatttggtattggtcttatatatgcataggagcaatatatttattaatttttctattaacaattaattccagttttgaaaaattcaaaactaatacgaaaaattctaaagaaacaaaagaaaaatggaactttaatgtatttttattgtcgatttcagcattattgtatatattaggacaattaggatttatttcctgggtaccacaatatgctactgaaatcatgaatattgatataaaaaaaactggtagtttagtgagtggtttttggatgtcttatatgcttggaatgtggttttttagttttataattaaattttttaatctatatcgtatgtttatttttcttacaagcatgtctacaatacttatgtattgttttattaaaagtgaaaattttttaaatcagcaatatataattattagtttaggtttcttctcgagtgcaatttatactataattattacattagcatctttgcaaactaaacatccttctccaaaattaataaacttaattttattattcggaacaattggaacatttcttacatttattataactagtccgatagttgaagcaaagggattatacgttactttaattagttcaaatatattatatggtatagtattttttctatctattttgatttattttaacaaaaaatacgaaagagttatataaaaattatttataataaaaaatatctgcattaaaaataaactagaagaaaattctggtttatttaaaataatggaattaatcctaatttatcatatacttttgttaaagttttattagattttaattgagatttcatggcgccttcataagctatcttttttaaataaacttcatcattacgataatcattataagatttttgtaatttatataaaaatttagacaagtgatctgcaacaatatttttgaactctgagtatagcataccttctagttctttgagtaaaatatcaatatctttattagtaatggctgaaagaatttctaataaatttgaaatacctggtttcttttctatatcatagtatattttcgatggtgtttctgaatcagtataagcgttttgtatttttgagataacagtttttatatcgtctaataaaaaaattacattctttttatttatatccgatttagacatttttttacttggttctaataaagacataattttagaaccatgttgagtaattaatggtttaggtaatgtgaatacatgaccatataaagaattaaaacgatgagctatatttcgtgttaattctacatgctgtttttgatcttgccctaccggaacaaaattagtttgatatagtaaaatatctgctgccatcaaaatcggataattaaataaagctgcatttattttttttgaacaattgctttttatcttaaattgtgtcatacgaagtaattctgaaaattgactaaaacaatttaaaatccaattcagttggctatgttggtaaacatgagattgaatgaaaataatgcttttttggggatctacaccacaggataaataaaaagatattgtatctagtatagatttatttaaatgaattttatttttctgtatagtcaacgcatgtaaatcagcaatacagtacagacactcataattattttgcattttcgaccaatgacgcattgttcctatatagtttccaatagtcaagtttccggaaggttgtacagcactaagtaaaataggtttcgataaaatcattttatatttcctaaataaaatgttagtgaatagacctagaatgagcgtattccaatttttttcgaattttttcaataacaagtttataattagaatatttaaacaatccagaccccataacaaaaacattagctccagcacacgcaatatctgcaatattgtctaattttacaccaccatctacttctaaaagaatatcagaaaaattagcatcaataatttttcttacttcacgtaatttattaaatgtagatggtagaaaagattgatttccaaatcctggatttactgacattaataaaattaaatctaatttttctaatatataatcaagaaaattaagaggtgtagcagggttaaatgccaatcccgctttgcatccgttttctttaattaaatttaatgttcgttcaatatgaagtgtagcttctggatgaaaggtaataaaagttgctcctgctttagcaaattgagggattaaattatccactggtttcaccattaaatgaacatcgattggtgccgtaatattataattacgtaatgattctaagatcataggtcccatgcttaagtttggtacatagtgattatccataacatcaaaatgtattaaatcacttcctgcatctattactttttttatatcttctcctaagcgtgcaaaatcagcggataaaattgatggagctaaaaaaaacttattcatcttaattgtcctgtctttaacttatattaagttattataataatgattttttctaatgtttttcagtataaaaaaatagaacactgggattttataaaattaaaaaatttttatataatacaagagctagtcaaaaacatcttgatttaatcaaaaaaagaagtagatttttaaatagattccataaataatactaatctttttttataaaaataaaaataattaatattctatctagtataattcttatatttagataaaaaaagtagattcgaggatatcaagaaataaatttttatttttaatttagtatcataagaaggatggataaaaactgattttaaatatcttcaaacaattgttataattttttataaccctgataaacagacaccaaacttcattttcatgttgatatcatctgctattaggagtatctatttaaatgcagatatatttttgtgcattataattattaaagctactatttaacatataaaaaagtatagaataaatataaagataataattatatttaatgtgtaaaatcataatgtagaaaatgtaaatagtatatcaaatgtacttttttctaaaaaaattttaatagtatcgtctgatattccacaatttctccttgctaactttaaaatagagaatttttataaagtatttacatacttatattaattgttttaaaatagcaatattttaaaaaatattgtttttactctccatagttttatttttatagtttaaaatatattaattataaaattatgtaatttcttcttaaaagaataaaactataagagcaaaatagtaaaagctacataattatatatgatatataaataattttaatagtttagatggtcaaaatttattgagaatgtttaatagcggttaaaataatatttttatctatattgctataaatttctgcttttccaatagaaagtggtaaaactaatctcatttctcccgaaattacttttttatctctcatcatatagggaagatatgaagcagcagacatgtttttcggtccctttatgggtagaccggttctttttaataatacaagtattcttttaaaatctattgtttttaagtgtcctagcaattcggatgtacgtgcagccataaccattcctactgatattgcctccccatgaagccaattgccataacccgcgtgaacttcaatagcgtgaccatatgtatgaccaaggtttaataatgctcttaaattattttctctttcatctaaagcaattaattgtgattttaattcacaacacttctttatacaataagacatggctgtatgattaagagataaaatagattcaatgttttcttctaaccaacaaaaaaacgttttatcaaaaacaatagcatatttgattacttctgccataccagatactaattcattatatggtagggtcttcagacaatcaatatcaataatcactgaagacggttgccaaaaagagccaatcatattttttccaagtaaatgattaacggctgtctttccaccaacagatgcatcaacttgagataaaagagtagtcggtatttgaataaaacgtacacctctctgataaacagaagcagcaaagccagctaaatcacctatgacacctccacctaatgcaattaaagttgtatcacgagcgtgctttttttctaataaagcagaaataatcaactccatctcatttaatgttttatattgttcgccatctgataaaattacttgatctatcttaattccggattttcttaaatgataaaaaactttatctttcaaaagattagctagtgttttattggtcactagcattgcttgatctccgggttttaaaggccagaaaatatcatcttcttgaataataccagctcctatactaataggataactgcgttctcctagaacaacttgcaatcgttccacaattttcatactccataaattctttattatatttcttctaataaacgaattatattaaaagctacagatttagcactttgatcatcagttttaacttttatatctgcaatttcttcatagaaaggatttctttcataagctaaattttctaatatcatccgatttgaatcagcattctgcaacaagggtctttttttatctctcttagtacgtgctaattgtttctcaatagtagtttctaaataaactacaataccacgagatgacaaaaaattacgagtttctctaaatttaactgaacctcctcctgtagcaagaacaataccctgtttagtagttaattcatcaataactctttgttctctcaaacgaaaaccactttcaccctctacatcaaaaacccaacttatatcagcaccagtacgtttttcaatttcttgatcggagtcaaaaaattccatattaagttgttgagataattgacgaccaatagtgcttttcccagcacccatgggcccaactagaaaaatatttcgtttttctgccatatttttattactaagataattcgttaataataccaatgctcagcatactttgctggcaggacatgaacacacgttgaaaatagaacaaagttaattattttttaaataaattaaaaatcattttaaaatgtaaaaatattatgtaaatttctatattaaaaaacattaataaaattattttaaattaacgagtgatgtatattttaaaaaaattgtattattttttcattaataaatttaatccttcttattagtacactaaaaagataaaaataatgattttttaaaaaatatattctatcagaatcagtataattttttctatttttattttaaataaaaacaatttttctacttactataaaaaaaatattagatatctttcaataaagatataatacaaaatcagtaaaaacttgacgtagtttctctttttatattagaatattaaaggttatttttactattcttctattatagtaaatatatatataaaaaatggtgaggtgtccgagaggcttaaggagcacgcctggaaagcgtgtatatggaaacgtatcaagggttcgaatccctttctcaccaaaaaaaataaaacacttttataaaacagattccaaggctagttcaatcatatcattaaaacttgactctctttcctttgatgaaagaaactctttatttgtaatatgatcagatactgtacatatcgataatgcttgaacttttaattcagaagccactccatatattcccgcagtctccatgtcaactccaataatattatatttttttaaaatatttagcatttttttatcatcattataaaaagaatctgttgtaaaaaaattaccaatggagacttttattttcattttttttgaaattgagactatattataaatcatatcaaaatctgcaatggcagcaaagtcatgatcattaaatcttattctatttactttagaatcagtagaagctcccatactgattactatatcacgtaactttatatcatctcgtacagcaccacaagttcctatacgaataattttttttacattaaattcaataattaactctctggtatagagagaagctgatggtattcctataccatgactcatgattgaaatctttctatttttataaaatccggtataagctaacattaaacgagtatcatttacttgaacaaaattacttaaatatttttcagcaatatattttgcacgaactgggtctcccggcattaaaactatatctgaaaaatcatcttttttactattaatatgtggagtagacattaattttttcctttttcaatataaaaaactatacttgaaaattttaaagcatattttgaccataagacatatcagtcaaaagaaaatattttgcaatagtttgtcctatatccgcaaaagttttacgatgacctaaaaaattttttttgataccaggtgaatagattaatacaggaacgttttctcgagtatgatcagttcctatccatgttggatcacacccatgatccgcagttaaaattaataaatcatttttttgaactaaacttattatttcagataatctagaatcaaaaagttctaaacctttggcatatcccgaaacatcacgacgatgcccccagtttgagtcaaaatctactagatttgtaaaaacaatggtattgtttaaagcttttttcatttcatgaatagttgtactacatagttcataaagtccagtagattttatatttttacttatccctattccaccataaatatcagaaactttaccaattgcaattacttgtccttgtttttcatctattaatttttttattactgtcgtagcgaaaggttttattgaaaaatcacgtctattacctgtacgttgaaattgtaatttatcatttccaataaaaggtcttgcaattactcttgctactttgtaattgtatcgatctaaaataaaacgaacagttttgcataatttataaagatttgataaaccaaaaaactcttcatgacatgctatttgaaaaacagaatctgatgaagtatatacaataggtttttttgtttgaatatgttcttctcctaaacgacttataatatcagttcctgatgcatgacagtttccaataaaacctgttaattcagaccttatgataattttttctagcaaactttcaggaaaactattctgtttttctttaaaataataccaatcatctagaactggaactcctgcaatttcccaatgtcctgacgtggtatcttttccagaagaaatctcgctagcaaaaccataactagcaataacattagaactataattaaatcctagaggatattgtcccgtagattctttagctgcattaattattcctaattttactaaatttggaatacataaaacaccctttcttcctacatttgcttcgcctaaaaaacacttttctactatatgtccaaatgtatttgaaccaacatcattaaacttatcagcatcaggactcgatcctattccaaaagaatccaaaacaattaaaaaaactctcttcataattaaaattccaaaaatttatcaaaaaaaatagctatctttttgattttttaaatactactgctctcgtgttgcattaaaagaaatatcagaattctgactcatgactatatttaaattagcagagctaggtgctaaatatattaaactattagaaatatcatatgctaaataagaactgtaacttttttttaaattataaaggctgtgatgatttccataattaatccagcgtgcaagaacaatatttacttttttatatactgcatcaatattatattctattcttaaacgttcaataacaacatcaaattgtaatattccaatagcacctaaaattaaatcattattaagaatcggacggaatacttgaacagtgccttcttcagacaattgaactaaacctttttttaattgtttttgtttgagaggattttttaaataaataagacgaaaaatttctggtgcaaaacttggtataccaataaactttatttcttccccttgtgtaaaagtatctccgatcttaattgtaccatgattatgaagacctataacatcaccaggataagctttatttattgatattctctctccagctaaaaaagaaaaagcatcggaaatgattatatttttttttattcttacatgtgttaatttcattccttttgtatactgtcctgaaacaattctcataaatgctattctatcacggtgttttaaatccatattagcttgaattttaaatataaaacctgtaaactttctttcttgaggttttattatccttttgttactttgacgatataatggagaaggggcccattttattaaactatctaacaaatgatcaataccaaaattaccaagagcactaccaaaaaaaataggagtagtaataccttttaaaaatttttccttattaaattttgaatatacattcatgattaattctaattcttgacgaatatgtatagataagtcggctcctaagtattcatttaatgaaccatctaaaaaactatctaaagttaaaaaattttttctaaatttacttttatataaatgaattattttatcataaatgtgataaactcctcgaaaattctttccacaacttattggccaactaataggaatacagtgtaattttaattctttctcaatttcatcaagaatttctattggatctcgactatcgcgatctaatttattaataaaagtaataatgggagtgttgtgaatacgcgcaacatccattagttttctagttcgttcttctatacctttagcagcatcaattacgactaaacagcaatctacggcagtaagaatacgatatgtatcttccgaaaaatcttgatgaccaggggtgtctaataaattcattaaaatatttttgtatgtaaattgcataactgaagttgttatagaaattccacgttctttttcaatattcatccaatctgatttagcgtattttccacttcctctcccttttattgttccaggaacacgaattacttttccaaaaaataacattttttcagtaatagtagtttttccagcatcaggatgagaaataattgcaaaagttcttcttttacttaattcctgttcatgatttgaatcaaacatgtagatactcatttaaaacacttaatattaaatcatcgtataaaatataatacataaaaaagtattatctatctaatgaaataatcttaagaattaaattttaattttattaaatgtaatactttcatgatcttgagaacataatactcataaataagagttaatgaataaataaaaaacttatatatattgcatatacagatcgaactaacagtataaaaaaaatacaaatataggcgtctttctatttcttaaatattttaaaaaacctaaaaaaaccgaatttttatagtagaaaaagactaatttttattgtaaaagaatgttaactattaattaattctcctgatatatcatgagcaaaatgaaaaaatcatctcagatgacacagaaaaaacttaaaaaaattagtaattatatataaactagtttacaaatttctctatcagaaatataatctgatagtcgtgagaatgcgttgaacccatttctctcatagtttcaaactatcctattaatacagcaactttattttttcattaagaactattaaataaaaaaatagaataactacatcgtctacctatatttttgattcttttttctgttatgaaaaacactcttagaagaagtaaatattagttacatttataaaaagtaaaataacaagcaaaacaaaatcaaagaatataaaatagcaccttaacttattagcataatcacaatttatccgcgcgtttccagaaaggtaattcaaaatcttttatagccgtaaaaatattgatttcatatatataaagaaaaagaaacgcacctaaaagtagaagttttttgaaagaacaatatctttctggacataaaaaacattattatgcttataaatttgacacaatttgtatctgtaagagtaaatatgaatcgatatataaaaaaaggatcttacaaaagttgaaaaaactagtagatgggatttatttaacagaagaattttctttaactaaattgcattgcttttcggttaaaacatcttaaaaaaatttatattacagtaaaaaataatttaattagtgaattcacgcatatttcgtggcatcagcaatatttttcaaattaataaaatgaatgttgtccgtgcagatgatgtgtctcatcataaactttttttatttcagaaaaagaagataataatttcttctcgactgtttcttttaaagttgatccaatcattgagcagccattacagcctccactaaattgtattgcagcaattccatttttatctattttaattaattcaactcttcctccgtgcattgataactgaggattgatttctaaatttaaaaaacattttactttttcttccagtgatgatgaaacttttttagaaaaattatttttagcatatggagcttttaatgttaattgagatccaattttatcagtaacaagatcgatcactgaattttttaaataagaaattgtgtctttatttacgtacacaaaaaatccatcgtattttaattgaatatcagatagttctatttcattttctggacaaaatgcaacaccgcattctgcattaggtgtacccggattgactataaaaacacgtatttgagtattttcgggttcatttgataaaagtgatgtaaaatgttcttgtgcttttttggagatattaatcataatagttatttaaaaaagtttttatttcatagattatactactgatttattaaaaaaaacaagacatttaagttataaataaatattttctttaaaagaaaatactttagttaataaaaacacaaaaaatcaatatcattatatgtagttgataaaaaaatctagaatttgatttttttattattaaaaatatgaaatttttacttaacattgtatatgttaaaaaattacttaatacaaataaaataaaaatttatctttatcaaagatagataaaacaattaaattgttatagtagaatatatctaaaaagtttattgattgaaaaaaataatattaaaagaaaataaaaatatttttacattgaaaaacagatcagaaaaaatatattatttttttatctaaacctaattggaaataattaaaaaataattaaaaaaagagtcttcaattcattgatatataaaatataaaatgcacttaatgctgatttgaataacattaagaagaaaaaataatttactcttcaaaaatagttcataaggattatgaaaaaatgcgttgccccaaaaaattggggctttttattgatttgattattaaaatttttcattaaaaaggaatttcatcatcaaaatctatttccgaaggagaatgagttaaatctttattcgattcatgtgtttctatctttttatcaaactctactgcatctgttttttttatttttattccggtactgtttttgtcatttaccgtcattgcctgcaagttagaattacgattgcctaacatttgcattgtaccaccaatatttacaataatttctgttgtataacgttctagtccattttgatcttgccattttctagtttgcaacgatccttcaatatacacttgagaaccttttcgaagatattcaccagcaatttcagctaattttccaaataaaactattctatgccattctgttttttctttattttcaccagtatttttatctttccagttctctgaagtagctaaagtcatatttactactgcattaccattaggcatataacgaacttcgggatcttgacctaaatgaccaataagaataactttatttacacctctacttgccataacaaaaactccattttttaaatttcatctaaaatacatttcaatatgtaaaatgaaattatacatgttaaatattttatttagtataatttaatctataaaaatgctatattattctttgaaaactttaaaatatattaaatattaacttcttattatttctcgtcattaatttaaaataaaaaaattttataatttttacatcgtacatttgaaaaataatattcgtattgaaaataattcgatgtttcaatgtaaaaaattacctataaattttgttaaaacatttataattttttaaataataacattattataagtttaataatttttaaaattatattcctttctaaaataaatcaaaaatataaatataatattttaaaagatgaatattaaaatattatataaaaaaatagctatttctgattaaaataatatttaaaaaaatctattatttgtatacattatagtctaataataaaaaaagaaaaaatcatttaaaacaagtactaacagttcatattaaatatatttaatgattttttatttttataatttagacaaaaaaaaataaaaaaattttcaaaaaatgactcaaatagatcaatccatagatggtgtattattgcaatattacgatataatttcacatagattcactaaataatggtatatgcaataaatatggctaaagataaattatatttaaatcaaattaacagattaaaaatcccaccacattctttagaagcagaacaatcggtattaggtgggttgatgttagataatgaacaatgggatagcgtttcagaacatgtagttgctgatgatttttttagtaaaccccatcgcttgatcttccaagaaatgcaaaaacttctcgatctaggatatccaatagatttaattactctatctgaatctttagaacaaaaaggaaaattagaaagtgtaggaagattttcttatctagctgaactttcaaaaaacactcctagcactgcaaatattactgcatatgctgatatagtaagagagcgcgcaatagtaagagaaatgatattagtagcaaataaaatagctaatgctggatatgatacacaaggacgaaaaagtgaagaattattagattacgcagaatcaagtgtctttaaaattgcagaaaaacgtttcaaaaaagactcaggaccaaaaaatgttgaacaaattcttgatgaaactgttgctagtattgaaaaattatttctatcacctcatgacggcgtgacgggaattaatacaggatatcaagatttaaataaaaaaacatcaggattacagcgttctgaacttatcattattgcagcaagaccctccatgggaaaaacaacatttgcaatgaatttatgtgaaaatgctgctatgctttatgataaacctgtattaatatttagtttagaaatgcctggagaacaaattatgatgcgtatgttagcatctttatctagagtcaatcaagcacgaattaggactggacaattaaacaacgaagattgggcgcgtatttctgggactattaatattcttcttaagaaaaagaatatctatattgatgactcatcagcattaactccaagtgaagtccgttcaagagctcgtcgtatttatcgtgaaaataatggattaactttaattatggtggactatttacaattaatgagagtcccttctttatccgaaaaccgtactcttgaaattgcagaaatatctagaacattgaaagcattggcaaaagaactacaggttccagtaatagcattatcacaacttaaccgatctttagaacaaagatctgataaaagaccagtaaattcagatttacgtgaatcaggatctttagaacaagatgcagacttaataatgtttatatatcgcgatgaaatttataatgaaaatagtgacttgaaagggatagcagaaattataataggaaaacagaggaatggaccaattggaacagttcgtctaacttttaatggacattggtctcgatttgacaactattctggtcaaaaatatgattaaatatgaatatttttaaaatattttcatgatttaaaaataaaaattatagttgtcaaaaaatatttttttaattatttaataattaagaattaatttttaattaatacattgtttaaatattaaagaccattaaattttataaaattaaaatttttatgaaaataagtacattaatatattttaaaaaaataattaaaataatattatctatttttaaaaaattgttcaattaaaaagataaaatatatgtctaaaaaaataagtttaaagattggaatattaatggattccattgaatcaattaacattaaaaaagattcaagttttgctattttactagaagcacaaaaaagaaatcatattattcactacatggaaatgaatgatctttatttaagaaaagaacaagcatttgcaaggactcgtttaataaaattaataaaaaatacacaaaaatggtatcaatttattaaacaacaaagtatttctttgagtgagttagatgttattttaatgcgtaaagatccaccgtttaatactgaatttatttattcaacatatattttagaacgtgcagaagaaacaggtgttttgataattaataaaccgaaaagtttgcgagattgcaacgaaaaaatatttacatcatggtttcctgatctaattactgatactttggtaacaagaaatatatttcagatacgtcaattttgggaaaaatatcaagacattataataaaaccattagacgcaatgggtggtgctaatatctttcgaataaaaaaaaacgatcctaatttttcagttattgttgaaaacatgacaaattatgaaagaaaatactgcatggttcaaaattacttaccagaaatcaagttaggtgacaaaagaattttaattatcaatggcaaacctataccttggtgtgtagctagaatagcacgaattggagagacgagagctaacttagccgcggggggggaaggaaaaatacagtccttaagtgagacagattggaaaatagcaaattatttatctcccactttaaagaaaagaggattaattcttgttggattagatgtaataggtgataaactaacagaaataaatgttacgagtccaacatgtatttgtgaaatagaatcgcaaaaaaatatttctattaccggaatgttgttagattatattgaaaaaaaagtatgtttgtagagatcataaaatgatagtaattgcatttgattttggtataaaaaaaattggagtagctgtaggagaaaatataactaaaaaaggaagacctttaagtgttttaaatgctcaaaacggatgtccaaattggcaactcgtaaaaaatttaatacaatattggcaacctcaatttatcgttgtaggtttacccttaaatataaatggcacaaaacaaaaaattactaataaatcagaaaaatttgctaatttattaaaatataaattcaatattgttgttaaaatgcatgatgaacgcttaactactgtggaagcaaaatcaataatattcaaaaaaaatggttttaaaggattaaaagaagaaaaaattcactcttgtgctgccgtcattatattagaaagttggttcaatcaatattaatttaaaatgtaattataaaaaactattttaacaggagaagaatatgaatagtattcatcttaattttaaatctataaaaaaaaaatacaagatattataaaaaacaataatcttcctttgaaaaaaataacaatcatcgcagtaagcaagaatcgaaatatcaataatattgaagaagcaatacgatctggaattaataattttggagaaaattacctacaagaaagtcttattaaaatagaaaatttaaaaaagtacaaaaatattacatggcattttattggaaaaatacagtctaacaagactaaaaaaatagctcaaaatttttcttggtgtcaaacagttgaccgagaaaaaatcgcggttttattaaacaaatttagacccaaaaatttaccaccaataaatgtgttgatacaaattaataatcttaaagaattacaaaataatagatatatagatcaataccaagaattagcacaactaatcttatcaatgcctaatctaaatttaagagggattatggccgttccttcaataaaaacaaatgttattgaaaacaatttacaatacgaaaaaataaaaactatatttaatcgatttaaaagacaatattcatcagtagatactctatcattaggaacgagtgttgatataaaagaatcactacttgctacaagtaatatggtaagaattggacgtaatatttttaatatataaaaaatttatttgtttaaatcaatataaaaagatgaaattattatgtttacattgcctcctattagtctgtatattcatatcccgtggtgtctaaaaaaatgtggatattgtgatttttactcctatgttagtaaagaaatcattcctgaaaataaatatatagaacatttattaagagactttgaaagggacctatctctaattaataacagaaacattaatactatttttattggtggtggaacacctagtttattaaaaaatacatcaataaaaaatttattgaatggtattaaaaaaagaaagataatttctaaaaatatagaaattagtatagaagctaatcctaaaacgctagaatatcaaaattttattcaatataaaaattcaggtattaatcgcttttctttaggtattcaaacatttaattcaaaaatgctaaaaaaaatagaacgtacatataattcaaaagatgcgatgaatgcaatcatagaatcaaaaaaaattagtgataatattaatttagatttaatgtatggtttacctggtcagtcattagaagaggcattatcagatttacagatcgcaattcaatgcaacccatctcatatatcatggtaccaactaacaatcgaacctaatactgtattttatgcaaaaaaaatacaaacacctcatcaagatgtagtatttaatatgttgattgaaggagataagctattaaaaaaagctggatataaaaaatatgaaatatcatcatattcgaaattcaactatcaatgtcaacataatctaaattattggaattttggagattatataggaataggctgcggttctcatggtaaaattacgcaaaaaaatggggaaattattagaactattaaaaacaaaaacataaatgattttttaagtggaaaatatatcaattctgtatatcaagtgtctaaaagagataaaatattcgaatattttatgaacgtttttagactatataaacctattttcaaaaaacatttcagagaaaacactaatatagaagaaagttttatagaaaaaaatattcaaatcgctatacaagaaggattcttaattaatcaatcagattgttggcatacaacaaaaaagggaaagaattttttaaattcgctattagaaatatttttaaaataaaaaatactatttttttagttgaaacatcaaatcaaaaatttttttaccttgtagcaatccttttttttcaaatttagttattatacgagaaacgggacgttttacaaaattatttttttcagataaatttttataatttttaatatcttttatttcgtctaatatataaaaagcatatgattctgaatctgtagcaatatgtaatataccatctattattaatttttttgtaataatttttaaaaaaatattttttaaaagtcttctcttatgatgacgttttttatgccaaggatctggaaaaaaaatttgtactttagacaaagtatcgtctggaatcatattgtacataacttcagttgcatcataataaataattcttaagttttgaatttgataagaagatgcatagtgcaaacaagatcctattcctgatttatatacttctattcctaaaaaatttttctcaggaaaattcatagcagttttaactaaagattctcctgaaccaaaaccaatttctaatattattggagcacgatgcttgaatatagatgaaaaatttaatgcatttaattggaaatcaacaccaattaaagaccaatattttttaattgcacttaattgagatgtcgttgtacgaccttttctacatacaaaactatgaatttgacgcaaaaaaacaccttcaagattatatctcggagttataatattatttttcatattttatctaataatttaatttaaataatagcagcatattaatatttttttaaaaaacacatactcaaatatttataaaaaaacggcttatattataatgacaaaatatattttttcacaactagttttaaactggtaccacaaaaatggcagaaaagacttgccatggcaaataaataaaacattatatacagtttggatatctgaaataatgttgcaacaaactacagtaaaatctgccattccttatttcaaaaaattcatactaaattttccaaatattaaatctttaaatgatagcaaattagacgacgttttatatttatggagtggtcttggatactataatagagctaaaaatatttataaatcggcgcaaattattaagaaaaaatataaaggaatatttccggatcaattttcaaatattattcaattgcctgggatcggacgatctacagcaggagctattttatcgttatcattaaattttttttatcctattttagatggaaatgtaaaaagaattctagtacgctactatggaatctcaggtttattaaaagataaaaaaatcgaaaaaaagttatggaatataattgaatcgattaccccaatacataacactggtaaattcaatcaaggcatgatggatataggggcatcaatttgtatatcgataaaaccaaaatgtacaatttgtccattaaaaaaagaatgtattgctcaaatagaaaaaaaatgggaaaaataccctttaaaaaatataaaaaaaacacttcctcaaaaaatatcttggtttattatcatcaaacatgaaaataatttttggctaaaaaaaaatacagaacaagaaatttggaaagaattattttgttttccaaaatttaagaacaaagaggaagctttaatttggttgaaagaaaaaaaaataaatataaatacatgtgaaaatatgatatcattttttcataaatttagtcattttattttgcatattaatccaatcttaattagattaccttatatttcagagttttttaaagaaaaccataaaaaaatctggtataacttaaaaaatcctcaacatataggactaccgagaccggtacagaaaatacttgaaaattttaaaaaaaatattttttaaaaaaaggagtattaaaattatgaatcgaattattttttgcacattttttaaaaaaaagtctgaaggtcaagattttcaatcctacccaggtaaattgggaaaaaaaatatatgaccaaatctcaaaaaaagcatgggagaaatggatagaaaaacaaactatcttaattaatgaagaaaatcttaatatgtttaacttagaacatcgtaaaaaaattgaaaagtatatgaaattatttttatttaaaaaataaaaagcaaatagaaaataatttctttgaatttttaaaacattttctaacataaacaatgtctaatattaattattttacaaaaaaattcttacagtgcttatatttgattctggcgtcggtggattatctatactaaaaaatataaaaaaaattctaccaaacattcattatatttatatgttagataatgaatcctttccttatgggaataaaacagaattttttatcatccagagaagtataaaaataattcatacaataaaaaaaatttaccctattaatgttgtggtgatagcttgtaatacaatcagcactgtagctctatctattttaagaaaaaaatttgatattcctatttttggaatattccctcatataaaagctgcagaaaaaataactaaaaataaaatcattggtttgatagcaaccaaagcaacaattaattctagttatactcaaaagataatatatgaatattcttgttctaacactataaaaataataggtacaaataaattggctgtaatagctgaaaaaaaaattcgaggagtagcagtctcgcaaaaaaaattaaaaaatatttttagaccgtggataaatcttccaacatgtcccgatactattatattaggatgtactcatttttcattattagaaaaagaaattaaaaatattctatataaaacgcgatcagtttactttattgattcaataaaaaaagtgatttttcagattgaaagttatttaaaaacatcaaatgttaatcaaaaaataaaaaaaaatatttttttatattcaaaaaacaataataatttaaagaaactattatcgtttttaaaacaatataaatttacagtaataaaacatattaatttgaattaatatttttcaaaaaacaattttttatacttttgaaaagaaaaatctaataattgttttaataacactactttttctgtattattagaatatttttttaatagaaattgaatattgtttttatattcttgaaaagaaactggatttaaaacattcatacaatgttttaaccatatttttttttcattatcatctaatgtataaaaaaattacgagcacgataacggaaaaataaattttttaaacgagaatcatgaaaattacaaaaaatatgttttaaaaaaactggatcagtatttctgatgatttgtattttttttttatcttttgaattaaaaaaaccattatatatttctaaatcaacattaaaaaattgattagtattattatttttagagaaaataatctttatattttgaataaaaaacatattttttttaattaattcaatctttttatttaatgaaaatctatgaaagttcaatcgattataatcttcttttctaattacttgaattggagccaaaataggacaacgatttaagtgcaataatactacccctgaatcgagtaaatttttgataaaaatactatcaaaacatatttttttgcacatatttattagtgttttaatatctttaaataaatcaatagcgattaatatattactattgttttcatgccatgctataggaagtatacaactcatattatgatagatagcgccaaaataagcggaaatataaattattggttgaaaattccttaaatcaattaatttatataattcatttttttttcttattttaaaaaaaaagtcaaaaagtctaggttgttttttcttgacaagctttgctatttcaatagtcgcataaacatctgaaacagcattatgtgcatttaaatgaacaatattgtttgtctttgttaaatctgatagtttaaaacttgttaatcctaattcgtttttaggccagtttataccagtgggtctgagcgcataacaagctcgtaataaattcaatatatcccaacgagaatttccgtttttccaactccattcataagggtcaaaaaaatttcgataaaatatatttcttgtaatttcatcatcaaaattaatattattataaccaacaacacaagtattcgattgcattaaaatatcatatattttttgagaaaaattatattcattagttccatttttttctgtatattgaggggtgatatgagtaattaaaacagaaccggggtcaggtaaataatcatctgacggaaaacagtaaaaatactgcggatcatctattatatttaaatttatgtctgttctgatacatgcaaattgagcgggtttatctaaagctgtatgtatcccaaaagtttcataatcataaaataaaaaattaggtgtttttttttggaattgtatcattttaaatttcaataaaataattaaataaaatattgaatccttagaaaataaattcaattgataaaaaaggtttctcaacatgtcagatacaaaaaaatcatttaaaaacgtattagaattcgtacataagtttagaagaaaaaataaaattaaaagagaaattagtgatattgaaaaaaaaataagagataatcaaaagagaatattacttctagataatcttatccaatatattacgttggacatgaattatgaagaaatcaaaaaaataatttttatgatgaaaagtgattatgaagaccgaatagatgattatattgttaaaaatgccgagctatctaaggaaaaaagaaatttatcaaaagaattaaagtttattattaaataaaaatttttctcctccgactggattcgaaccagtgacatacggattaacagtccgccgttctaccaactgaactacagaggaattaaaatatatataccaaaaatttttatgtgtgtcaaatatataaaaatttttttttaaaaaaaaataaaatttctaaaagaattctagattattataaaaaattgatttatagtaataaggttgaaaaatatggccctttagctcagtggtaagagcaggcgactcataatcgcttggtcgctggttcaaatccagcaagggccataaataaaaataaaattattctaatttttaatttaagtttttatatataaaatttgctgggaaatgtttaaaattaattaggattcaatttttatggactggaagaaagaatttattgatttttcttttaaaaaaaaagtactaaagtttggagtttttcaattaaaatcaggacgaattagtccctatttttttaattcaggactactatctacagggatagatattattaaaattggtttattttatgctcgctctataatagattcgaaaaataaattcgacgttttatttggaccggcatataagggaatccctatagctgtagccacttccatagccttaaaaaatcactataatttaaacgtaccatactcttttaatcgaaaagaatataaagaacatggagaaaaaggcgatctcattggaagcacaatatacaaaaaaagagttattattttagatgatgtaattacatcgggaactgcaatacatcattccattaaaataattgagaaacaagaagcaagtatttcttcgatattcgtacttttagatcgcaaagaaaaaggaataagaaagttatctactatcaaccattttagaaatcaaaaaagttataaaataatttcaattattacaatcgacgatctaatagaatatgtattagaagataaaaaattaaaagaacatataccacaattaataaaataccgtgaaaaatacggcatataaaaatttttttactaaattactccggatactccagaatgaccaaatccctttttagaacgggaagtttcattaaaattttttactaataaaaaacacggcctaatgattgggacaaatattatttgcgccactctatcatgcgggttaacgtaaaaatcttgatcactacgattccagagagatatcatcaattgaccttgatagtcagaatcaattaaaccaactaaattacctagtacaataccttttttatgacctagtccagacctaggcaaaattaacgctgtaatattaggattagcaatatatatagctataccagtaggaattaaaatagttttatgggcttttagttttactgtttcatctaaacaagctctaagatctaaaccagatgatcctaaagttgcatatgaaggtaaagaaaaattatttttcatacgtgaatctaaaatttttatttcaatattgctcataataaaattatatctttcttcaaattaaattgttaaattaaaattataatgcggacgcataaaaaccagaattaataaaagaaacacgtgaagacaatgaataatttaaattgccgcctgtccatgtttgtacttttccaccagccgctataacaatagcatgaccagcggcagtatcccatatatgagtatcaccaaatctgggataaatttgagcagttccttctgctattaagcaaaattttagtgatgaacccattttttttattttacaacattttattttttctaaataatttttcaaggtttcattaggatgtgaacggctaatcactaataatggtgcttctgcttgagcaacattaatctttttctttgatccaaatttttcttctttccacgcgttgtcataaaaagcagaatatagaacatcaaaaaagggagcgtatattacaccgagtatagggacaccgtattcgatcaaactaatattaactgtaaattcaccatttttttttaaaaattctttagttccatctaacggatcaactaaccaataactattccaattacgacatatttcaaaattatatgattcttcttcagaaataattggaatttgaggagaaattaatgaaagtccttttttgatgatattattggctgcataatcaacatcggtgatgggagtgttatctggtttatatgaaacatttataaatttttgagaattataaagtttcataatacaatgacctgcagaacgtgctaattgacaaattttatctaacattttacgccatatattattaatagtatcaaaaaaattaattttttgcaattattttcacaatgaaattaatagagactttactgtgcggctgaaaaacaactatatgctcaccaacttgacgtagtaaaccgttaggtaatcgtatttcttttttattaattttaatacctaacaatatgatctctttaatgatgtttctgactcctactgaaccaaatatcttaccttcctttccaactttagataaaattgttatagaatttattttttttaatttttccgctcttgactgtgctataagaagctcgttaatcttttctttttctaatgctatacgttgagcttcaaaagattcaatattttttttattcgctaaaattgctttacctttgggaattaagaaatttcttgcataaccagatttgacattgatgactgcacctgaatcacctagtttttttattttagataaaagaattacttccataatttattatcccttgttttataatgtaataattttaaaatattatctttaacgatgttgatcagtataaggaagtaaagctagataacgtgctcgtttaatagctctagataattgtctttgatattttgctctagtgccagtaatacgacttggaacaattttaccactttctgtaatataattttttaaaacagcaatatctttataatctatctcttgaacaccttctgcagtaaaacgacaaaattttctacgacgaaaataacgagccatttatttttcctctaaaattatttagaataatgaaatttttgtactattttctaattattcatattgtaaatttttaattttattaatatgttttatattttttaacaaaaggctggtatatgaaactattttttctcttttttatcatcttttaattttaaaataggtgatagttcgactattgcttttttcacagacatgatcatattacgaaggatgatgttattgaaacgaaaatctgtttctagaagtgtgatagttttaggaaaaacttctatgttcattaaaatataatgtgctttttgtaatttattaattgaataagatagctgacgtctcccccaatcttctaatctatgtatgatgccattgttatcattaataatttttttatatttttctataagcagtggtattttgtcgctttgatcaggatgaaccataaatattatttcataatgacgcattaaaatgctccttttggttttatttagcttcctcataatatgaaatgtaattttatgcaaattttcaaggaaacaaggaacttttttaaaattacagatgaatattttatactattttaattttttaaaaaaatcaataatttttgataaatttaaaaacgaaaatcaactagatttatataaagacaattctattttcttttcattcagattaacagaaattacttttacttttagagcatcgccaagacaataagtattcttggtagatttaccgattaattttaatcctaaagagtcaaaataataataatcatcatttaaagaattgatatgaactagtccatcaataaaaaactgatttaagcggacaaaaaaaccaaatgtagttacgttagaaataacaccatttagtatacaaccgatttttttatacataaaatcacatttcaaccaatcaatgacatctctatttgcttcatctgcacgtctttcagttatagaacagtgtgctcctattttttttatttcacccgtactatataaatgagcactataaaaattataattactttttgatgtatttttatctttaaataacaaatatttgataactctgtgtaatataagatcgggataacgtctaataggtgaagtaaaatgaacataactagatagagataaaccaaaatgtccacgattatctggagagtatacagcttgcgtcatagaacgtaataatacagtttgtatcatttcatattcaggacgatcagaaacattttttaataaatttgaatagtggacagattcaggggaatcccctcctaacaatgtaaaacctaattcatttaaaaataaacgcaaactaacaacattatcttttttaggacgatcatgattacgaaataaaacaggatatttatatttctcaacaaagcgagctgaagctacatttgctaaaatcatacatgattcaataaatttatgtgcatcatttctaatattttgataaatacttttaattcgaaggttagaatctaaaacaaatttaggttctatattttcaaaataaataccttttttagaaatattatctttattaaaaatgttctgtaaacatgataaattttcaatatcttttaaaaattttttatatttagaacgtagaaaaatatcgccattccagattttaaaaatctcattatacgtaaatcttccatgagaacatataatcccttcatagtgtttataactaattagttctccttgttttgataagctcatttcacatattaaacataaacgttctacattaggttttaaagaacataaatcagtagaaattttttctggcaacatcggaatcactaatgaaggaaaatatacagatgttcctctttctaatgctgctttatctaaaggagtattaggttggacataacagctcacatctgcaatagctacccataaaatccaaccttcttctggatttgcttttcttttacaaaaaacagcatcatcaaaatcgcgagcatcttcatcatcaattgtaaaaaaagggaaatgtcgtaaatctgtacgatttttaaaatcatattgatttatttttctactaatttcgtatacttgtttctttacttcttttgaccataaagaaggaattaagtgtgtacgcagtgctatctctatagctaaattagtacccatttctttaccaagaatttctactataaatccttgtactctgctatttcttataggatgttgttttaattttactgatacgatagatcctatagaaatatcgtctttaatagctgagaaaataaaaatcttaaaattaaaacgcgtatcatctggaattacaaatttaattttatcatcaatataatatctaccaacaatcaatatattgttgggttgtaataactttaaaaatcttgctgaactccttctttttccatgagtttcgactatatgtgcaagaataatatcgccatgaatacaggacttcatctgttctgatgacaaccataagtcttcttttaatgtttctgttctcagaaaaccataaccatctctgtgtcctataacttttcctttgacaattttgaggctttcaggagcaacataacaacgattactagtatatattacttgaccatctcgttccattgctcttaatcttcgacgtaatgctttttttgattcttgattattaataccgaattttttttctaaatttttttgacttatcagatcttgagatgttctcagacatgatgagatatattctcgacttggaattggatttttgtatcttttagcttctcttttttggtagggatctactaccatatttacttctccatgtatattgtttataatataattatacactaataaatttaaatcgatttcttcttatatatttattgagaacgcaactaaaataggaattaatattcaatatttgatgtaaaagtttcattttttaataaaaaaaatatctctaacaaaaataatatcagaacgatctggtccagtagaaataatatcaactggaatttgcgtgatttcttctatacgatttatataattacgtgcttcataaggaagatctataagttttttaatacctaaagtttttttattccagccgggataagtttcatatattggttctatatttttccattcatctatatcaggaaaagatataatttctaaagtattaatatttttataagctgtacaaatttttatttcatgtaatccatctaatacatctaattttgttatacataaaccagataaagaattaatacggactgatcgacataaagcgactgcatctaaccaaccagtacgtctttttctacccgttgttgagccaaattcatgaccttttttcgaaaaatgtttatctacatcatcaaacaattcagtagggaaagggccataaccaactcttgtagagtacgcttttgttacaccaagtatgtaatctaaacttttagagcctactcctgttcctgtaataacaccaccaatagtactattagaagaggtgacataaggatatgttccatgatcaatatctaaaaaactaccttgagctccttcaaaaattatttttttattgctctgaatagctgtgtgtaaaatactagtagtatctttaatcatatcataaattaaatctattgttggtaataagtctcttaaaataattttataatcaacaggtttatgtttgtaaaaagacactaattgatgattataataattgactattttttctaaacgtattgataaagttttttcattttttaaatctccaatacgcaaagctcttcgtgcgattttatcttcatatgcaggcccaatacctctacctgttgtacctagcgcactaattcctaattttttttcacgagctatatccatttcgatatggtattgtaaaattaaaggagaagaattagaaataaataaacgtttatgaacaaaaatattatgtgtttctaacatttttatttctttaattagctcaaatggagaaactactacgccattcgcaataattccgattacatttttatgcaatagtccagatggaattaaatgaagaataatttttttgtcattcactactaaagtatgacctgcattgtgtcctccttggtatcttacaacatatgaactatctttggttaaacaatctactacttttccttttccttcatcaccccattgcgtacctaatattacaatatttttattcatttttgtataatgcctatttattaaatatttttaaatatcatgattgaaattataaatttttaatgttgatcatatttttaatatatcgaaaaaattgactatctgaatcaattaacataatattacgattatttttaaaactattttcatacgcgcgcaaactacgaataaaaaagtaaaaatctggttctttattaaaattttttgcaaataatttagttacttctgcttctccctgaccttttattattaaagcttcttttcgtgcttctgataatattatagatactttataatctgctgatgcacgtaatttttccgctttctcttgtccttgagaacgttgacttctagctacagcttctctttcagctcgcatccgattgtatatagcatcagaaacttcaacaggtagattaatttgtttaatacgtacatctacgacgtgaatccctagtgcattcatactgttaacattaattaaagagctcttttctaaattcatactacctttatttaatgaatttaaaacatcagttgttaatctacctcttgaatcagtaacaatttctttaacattaagacgacctatttcagaacgtaaacgatcactaaattttctttttagtaatacttcagcttggaaaacatctccacctccagttgccagataataacgactaaaatcattaatacgccattttatatatgaatctacaataagatcttttttttctttcgtaacaaaacgatcggcttgattatccatggtatgaattcgtgcatctaacattttcactgtttctaaaaatggccatttaaaatgtaatccaggattatatactactgtctttagttcattattacggagaacttttccaaattgtaaaacaataccacgctctccttcttttacaataaaaaaagaagaagacaatataaggaataaaacactagatgcaaaaataagaattttgttcatattcattctcttcctattttcttaagatcgcttcgaatagaattaatacggcgttgttctgaaatgttatcaggagataaaaaaggaaaataattagtattttttacttttttattaaaaggagaatgatttttattaatttttatatgatctttaaaatttttattaggtatttttattttagaaaaaaaattgtctaaagagaaaaaaaacattgggttattatttgtatcaataaatatttttttattttttcttaataatctctccatagactctatataaagacgttttaatgttatttttttagctattctatactcaggtaagattttagaaaaacgagctacttctccttgagcttgtagaattatacgtgatgaatatgatttagcttcttctaaaattctttgtgctttgccattagctttaggtttaacttcatttgagtacgcttcagcttctcttacatattgctcacgattttcacgtgctgcaattgcatcatcaaacgcagcctttacttcttcaggtggtcttgctgtttgaaaattgacatctaatattgtaattcccattttatatggtttaattgtgttttcaatttctttttgagtatcacttcgtactaaagtacgaccttctgttagtactcgatccatagttgaatgaccaattacacctcttaatgcactatctgttgcttgacgcaagctatcatctggataacaaacggaaaaaagataatcagcaggattagttattttatattgtacattcatctcaacacgtactacattttcatcagcagttaacatgatacctgacgtagctaattcacggacagtttcaacatttacaggtttaacttcattaaaaaaaacaggtctccaatttaatcctggttgtactaaatgactgaatttaccgaaactagtaacaacgccacgttcagcttctgtaatagtataaaaaccactaacaccccaaataaaaaaacttataaatattattattgaaaagggataggttattttttttgatgaatttgaagaatcagtttttttagtaataatatttttaagattatataaaaagttttttatatctaatacagtagtttttttttcatgtttgttatctgaacagtttttacttttactgtccttattcccccacggatcaaaatcaggtttattattatttggtttattccaaaccatcgtgtacctcatttattagtttttttactaaaacaaattttaaaataatttaaaagttatatttttttatcattagatctgaaaaaagatataattaaaataaaacatcttatacttttataagtaaaaataaattttttataaatatgataatatttatacagaaaaatcgttcttttcaagtacatctaatactttttttgctaaaatagtagaagtagaatggtattctattttgttaatatttttccagttttttaaccatgtcaattgatgtttagcaagttttctcgtagcatgtattatcttattgaacatatctttataactatttttatattcaagatattcccacatttgacgatatcctatacatcgaatagatggtaaatttttatgtaaatctcctcttaaaaataatatttcgacttctttttgaaaacctaacatcaacattttttttatgcgaagttcaattttattgtttaaccattctttattcggaggtataattgcaaattgaaaaatattatatggtaatttatagttattctttttttttaattctgttaaactttttccagaaagataaaaaatttctagagctcttattaacctttgaaaatcatttttatgaattcgactcgcagagatgggatctattaattttagttttttatacaaataatttttttcatagcttttttgtatcaagtattcacgaagtttaatattagatggtggtaaaatagataatccatgtaataacacattataataaaacatggacccaccaacaagacaaggtatttttcctaatttaataatttcatctatttctcttaaaacatctttttgaaattctgcagctgaataattttcaactggatctttaatgtttaataaacgatggggatgattatataaatcagaaaagcttggcttatctgttccaatatccattccgcgataaattaatgctgaatctacactaattaattctattgacaaatattttctaagacaaatagcaagttgactttttccacatgctgttggtcccattaaaaaaataacaacaggtttttttttttataaaagttcatatttttaaaatacataatgctgcattaatatttattttttgtaataattttgatggaggatttattagtaataaaggacaataatattctatttctaaaagcacttcaattccacgaatataagtccaattttttaattctataaaaacattaatataaaaccaatctactatgtctgaaatgaagacttgttttttaagaaataaaaaagcaaaaaaatttgatatgattatatgaaaattgcatttttttaaaaaagcaggaatagaagataaaataacatatttttttttaaaaattaaatgaaatccaaattttgataatatttcttttttattaaataaaatcaagtattcttgagatgtaagattaattttaatattgcttaaaaaatactcaattatattttctttttgaatattgttttttaatttttgttttctcactattcccttagctacaggaaaagaaagtaataaaaaattattatcatgataaattaaaccataatatttgtgtattattataagcaaacgcccaatagaagattcgtatttctctaaaggagtgctttttgaaatgaaattattatgttttattttattttttatatttttgcaaatctgttttttttttaaaaaaattgaagatatcaatgttaaaaaagtaggatctgaatcataaaaataaaattctttttctttatttaactgtgtttgttttttgcatgaaaaattaaaataatatttttctttaattttttttaaataagaaaaaacagcttcataaataaatgtataaactacatcaggattatgaaatttaatttcattcttagtgggatgaatattaatatcaatattaaaagattcaatagttaggtataaaacaaatgatatattttttttttgttctattttagaataagcagcacgaacagcattaacaaaaatattattataaagatatctattattaacataacaatactgaatattttttatttttttaaaattataaggatgagatatccagccaaataataccattctatattttttttcttttatttctaaaaattcactcgtatcaagtgtgtcaaatatatcttttaatctattaattttattttttctattatttatagaattgtattgtgtaattaatttattattatgtttaagagaaaaatttatatagaaatgagataaagctattttttttacaacttcacagatcttcgaaaattctaattttttgttttttaaaaatttaagacgaactggtatattataaaataaattatctactataatagtcgttccttctggatgagcgattggttgcaaaatgatatttttactacaaaatccttctaaatatatctttgcagcaacatcgttgaatcgagtacaagaaattaaagttaatcttgaaacggctctaatactagctagagcctctcctcgaaaaccaaaagtggtcagtttatctaaatctgataatgagttaattttactagtagcatgatgacaaactgctaataataaatcttttttatcaataccacaaccgtcatcttttaatataatagattgaaatccgctattttctactatgatattaatatttttcgatccagcatctatgctattttctataatttctttaaccactgaagcaggacgttcgataatttctccagcagaaatttgactagataaatcagatggtaatatacgaataggcattaccttgttctctaaatttatttaaaatgctgtttataaaaaaagaatagcattctttcaaattttgtaaaaaataagttttataaataattttaaaattcatctaattatttttttaattaaattatattctaaaataatagaatagacttctttgctatttacaggtaaatcacaaattttaattatagtactttctaaaccttgtttttttattgaagatgaaagctctattgattccaaatcatttttattatggtaataaaatgctgctgcaataccttttgctaaattagaataagggagattgtactcaaaggcacccaaaaaaggtttaattaagcgatcttctcttcttaatttttgtaatggatttcttcctatacgttcaagtttatctgataaaaaagggttttcaaaacgcaaaaaaattttttcaatataatctaaatgatcatttttgttgaaattataacgttttattaacactgatccactttcttccatggcagatcttacgataacacgtatttttttgtctgatatagcatcctgtatagttttatagttttttattaaaccaagataagccgctatagcatgtcctgtattcaatgtaaataattttctctctataaaagcatctaaattattactgaatttcatatcaactatttttgggactgctcctttaaattgattaatatttacaatccattctttaaattcctcaacagttaaaaacaaatcatctttattattaattgcaggtataattgtatcaatactgcaatctatgaagccgatatatttatttaaataatcatgatattttataggtaaatttttgagaactacttgttttaaaaaagaacttgatttaatcttgttttcacaagcaataatattgagtggttttgtaaattgatttttaattttgaatattattccttgcgtaataatcaaagcaattttttctaatgcagtgggacctacggcagttgtaattaaatcaactgaagaaattattttttttatatttgaatcgtttgaatttatagcactgactcttttgatattgacggttttattttgattagaacctattattttaacaaaatattctctattataattaatagcatctactatattttgattaacatcagaaaaaataacactaaaacctgattctgatagtgtttttccaataaaaccacgaccaatattgccagctccaaattgtagtgctttcatgattaagtccaattcaaatttatattaaaattaataataaattaaattttttccatcgttaaaagtgatagtgcttcttttatactagtagtatgagataatctttgaatggtatcttttttatctaatgcattagtaatattgctaaccaccataatatgttcattatttttagctgcaataccaattacgagatatgcgatatcgtctacatcttctccaaaacgaacaccttttggaaattgacaaaaaattattccagtttttaaaacagaatcttttgcttcaatagttccatgcggtaatgctattgattctcctaaccaagtcgaggccattttttctctttctaacattgaatcaatataatcaaactttacataaccctgttttactaaatgcttaccgacaatattaattgcttcttctttattacttgcatattgattaagaataatgttttcttcgttcaactgaaacagagcatcttttttttgttgggtatatttgtttacagaatcagtgtgattgtcgtataaaaaaaccatattttctactaatttttttactaaattatcataaaaatggttatttaggaagttttttaaagatatatgctgagaaaatggtgcattatctttagctcgatttgttaagttttgatgtgtaattattaaatctgcgtcttgaggtaatgcattaatagccatatttaaaacagaaatatgatttaaattagcattttttatttttttacgaagaatacttgcacccattgcactagaccccatccctgcatcacaagccacgataattgttttaattttactaaaattgaaattattaaaatcttctcttgatgtttttgaattaaaagaatttttaccttgctttacagtatagttactatctttttgaatcgtattaaaatcgtatttcaataatatagaagaacttataaaagaaactaaaaaagaacaagcaacagaaataatattagaaaaatataaacccttcggtgtcatggctaaaatagataaaatcgaacccggtgatgctgtagaaattaaaccaccgtgcagtaaaacaagaataaaaataccgctcatacctcctaaaataagggggataattaattttggtttgattaaaacataaggaaagtagatctcatgaatacctccgaaaaattcaattaatgccgcccctccagaagatttagataattcgccttttccaaaaaaaaaccatgctattaataagcctaatcctggacctggattagattcaattaaaaaaaatatagaatgatttttatctaatgcgtcttgaattcccaaaggagaaaaaattccatgattaataacattatttaaaaaaaatattttagccggctctataataatagatgtaaggggtaacaaattataagataaaataatttgtattaatgttcctaaaaaataagagacccattcaataaatggaccaattgtaaaaaatgaaattattgccaataatatgcctagtatagcaagagaaaagttatttactaacatttcaaaaccattttttactttattttctatctttttatcaaaatattttatggtccatccgcccaaaggtcctgaaatcatagctcctaataacattggtatgttagtactagtaataacacctatagtagttatactgccgatcaagcctcctctagaacccgaaatcaaactacctccagtatatccaattaaaataggtaaaagataaaaaatcataggtgatattaattgttctaaagttttgttaggttgccatcctaatggcataaataaagcattcatcattccccatgcaataaaaatacttatattaggcattatcatattacttaaaaatcgaccaaaattttgtatttttaatttaattaatgtcaacataataaccactcatattctttaaaaaaatacagtttttaaaataatcttcaaattaaatattaataattaaattattattttaattttttaaaaaataaatattttgattaaaatatacgtattttgaagaagatttcaatgtattttttagttgtaatgttttaaaaaaaattgttagatcataaaagatttataaaaattaattaaaccttcagtagaagcatcgtaagatttatttttgacgttaatatttaaataattataaatattttgagataattcttttcccaattcaacaccccattgatcaaaactaaaaatatttaatatataaccttgaacaaaaattttatgctcatataaagcaattaacgctcctaaattataaggcgtaatttttcgaattaaaattgaattagtaggttggttgcctttacatattttaaaaggtaaaattcttttaatatcatcttgattttttttagatagaattaatcggtgtaaaatagaatctcgagattggccaaaagctaatgcttgtgtttgagcaaaaaaattagatattaatttcatatgatgattatttaaatcgttgtgtgaaaaaactggagcaataaaatcacaaggaatcaatctggtaccctgatgtatcaattgataaaatgcatgttgaccgttagtaccgggctcaccccatataataggacctgtttgataatttattctttgaccatttcgattaattgacttgccattagattccatattagactgttgaaagtatgcagaaaaacgatgcatatattgatcatatggaaatattgcttctgtttcagaaccaaaaaaattagtataccaaatactaattaaggctaataatatcggaatattttctttataatttgtatgataaaaatgattatccatagcatgagctccatctaaaaatttctcaaaattgtcaaatccaatcgataacataatcgacaatcctgctgaagaccataatgaaaaacgtccacctacccagtcccaaaacttaaaaatattattaatattaataccaaaatttaaagcgttttttatattagctgataaagcaaaaaagtgcttatctaaagcactttgatcttgtgaataatgtaaaaaccattttttagcactgtgtgcattagttatagtctcgtccgttgtaaatgttttagaagcgattaaaaaaatagtgttttcaggatttattttttttaaaacttcagtcaaatgcgtaccatctatatttgaaacataatacatatttaaatgattcttatatggacgtaatgcttcagtaaccatatatggtcctaaatcagatccaccaattccaatatttacaacattagaaatagattttcccgtataacctttccattctccatgaataaccatttttgaaaaatttttcattttttccaacaacgcattaacttctaacataatattacaattatttaatatgataggacgattagttcgatttcgtagtgctatatgtaaaacagaacgattctctgttttattaattttagctccagaaaacattaattttattccagattttacatcagtctctttagctagatttaataaataaattaaagtttcatcagtaattcgattttttgaaaaatcaattaacatttcattttcaaaaattattgaaaattttttaaatcgattcaaatcagatgcaaatagatcccttaagtgaatattttttatttttctaaaatgattttttaaatcttgataagattgagtgttattaaaattgatgtttttcattaacgaatttatctctcgtaaaatgtataaaaaattttcttataaagaaattgttatatatctaaaaaataaaaatatatttttaaatattttaaaaatttaaaattattttatttttaatgtgtatataaaatattttaaatttttctagaataatatattctaatcaaaaaatttttatatataattaacatatataatatagaaattaaataaaaaaaatcattaattaataattaaaaaaattctatttttatcttattaaaatcaagtttaatgttaataaaaaaatatttaataattatgaaaaaatatgaaaatcaataaaaaaaatttaatctggatagatttagaaatgactggactgaatcctaaagtacatcgtattattgaaattgctactttaataacagatactaatttaaatataattgcagagggtccggtaattcctatatatcagaagaaggaacatattttagtcatggatgaatggaataagagaatccatgaaaacaatggattgataaaacgtgttgaaaaaagtctttataacgaacaaaaagccgaacatgaaactattctttttttaaaaaaatgggtacccattcaagtgtctccaatgtgtggaaacagtattgcgcaagatagaaggtttttatttcaatatatgccacatttagaaaattattttcattatcggtatatagatgttagtacgattaaagaattagcttatcgatggaacccatcaatactagataagtttaaaaaaaatcattatcataaagcattagaagatatccgtgaatctgtagtagaattgaatttttataaaaaaaactttttaaaatttaagaaaaaataattttttacaaaagaaaacttgaaaaatttattttatatatataaaataaatttatagtataaaaaactattatatatatttattattgcgggaatagctcagttggtagagcacaaccttgccaaggttggggtcgcgagttcaagtctcgtttcccgctccaatcatattatccaaaaatattgtttaaaaataattgatataaaggaaaatttatgatttttaattcctgcaaatggataatattttttatatttttaatttcatttcacatcaaagctaatagtattttcgttaaaaaaaataatcccaaaaaaatacaaaatttttttttaataccgactatttaaaaaaaagtaataaaatattatatcagaaaaaaaaattttttaaaaaaaataatttttattataaaaaagaactgtctgaaaatcaaaaaaataataatatattgtcaaaaaaaattacgatattaatagatgcaggacatggcggatatgatccaggagctattggaattcgaggattaaaagaaaaaaatattaatatcgaaatagcactaaaacttgaaaaattactcaatcatgacaagatgttttgtacaatcctcacacgacacaatgattcttatctttcattgaaaaaaagaaagcagttacttaaaaaaaaccaggtgaattttttaatatcaattcatgctgattcttccagaaaacaaaatgtatccggagcatctatttggatagtttcaaagactagaataaatcgtgaaattaataattatttaaaaaacaaatccactcttcttttttctaaaaaaattgaaaacatatttaagcaaaataaaaacgatttttttttaaaaaaaactattctagatttacaatctaataattttcaaaaaatagagttagatctatctaaagaaatactaaaacaacttgaaaaaaatacaaaattaaataaaaaatatccaaattatgctagtctaggcatattaagctctattaacacaccttccatattaatagaaaccggttttattacaaatattttagaagggaaaaaattaaaaactactaattaccaaaacaaaattgctaattctatttatctaggtctcaaaaattattttacaaaatcgtcttatatattaaaaaaataaaagttttttaaaaaatattaattgtattattattaagcatctaaacatatcagaaaatcaagatgcttaaatcttaaaaaaatcaattaaaaaatacaagatagtttttaatttaattcttgcttagtaaacttaaagcgttttttaaatctttcaacacgacctccagtatcaatgactctttgtttacctgtatagaatggatgacattttgcacatatatctaaatttagattgtgattgatagtagaaaaaatttcaattatatttccacaagagcaagtagctgttatcttggaataacgagggtgaattttttttttcataaaagtattctcaaattaatttagagtatctacattcggatacaactattaatatatgaatattagaaaattatcaatttttatttataaaaaaagacatgaagaaaatatatgtataatgataaatataaaatcaattctgcgtattttaataaaaaaacaaaaaaaataaaaaaaaaaaataaattaacatgtatatgttttattttaatgtctacattaatttttattgtttatttaaatataaacttaaaaaaaccttctgaaataaaagataaaaattttataaaaaaaagcaaaaataatgatgtattacctcctaaaccaaaagaaaaatggaaatatattgaaaaattagaaaattcataaaacatatttttaaaaaatttattaggtttaatgagtaacattttatatgatgaaataaattatttgaaaaagtattgagaaaaatattttaaaaaaataatataagtaaaaatcatatgctattttaataaaatagataattacatcttatataaagtatttttgtattagcaagaatatataagaaacaaaaatattattttaaagaggcttttcttgtgaccacaatattaagtgtgagattaaaaaataaagtagtaattggaggtgatggacaagcaactttaggcaatacaatcatgaaaagtaatgtaaaaaaaattagatctttatatcacgaaaaagttattgctggttttgcaggaggaactgcagatgcatttactttatttgaaatgtttgacaaaaaattagctatgtatcaaggccaattacaacgagcagctattgaattagcaaaagattggcgatctgatagaatgttaagaaaactcgaagcattattagcagttgctgacaaaaaaacctccttgattattacaggaaacggcgatgttatacaacctgaagacgacttaatagctataggatcaggtggttcttatgctcaatcttctgctcgagcattaatagaaaacacgcatttagacgcaaatcaaattgtaagaaaatcattaaatattgcagctaatatttgtatatatacaaatcataatttcactataaaagaactattttcagaaaaataaggattattctctatgtctgaaatgactcctcctcaaattgtttctgaactcgacaaattcattattggtcaagaaaaagcaaaaagagccgtgtctattgcattaagaaatcgttggcgtcgtatgcagttaaacagtgaacttcgttatgaagtgacccctaaaaatattttaatgattggtcctacaggagtaggtaaaacagaaatagcaagacgtttagctaaactagcagattctccatttattaaagtagaagcaactaaatttacggaagtaggatatgttgggaaagaagtagactcaattattcgtgatttaactgatgctgcaatcaaaatgattcgaattaaaaatattaaaaaaaataaagttcgagtagaagaaatagtagaggaaaaaatattagatgttcttgtgcctacacctaaaaaaaactggacagaaagtgaaaaaaatgaaagtcttgcaaaaacaattcaaacatttcgaaaaaaattgcgagagggtgttttagacgagaaagaaatagaaataaacatattatcaactactatgggtgttgaaataatggcaccaccaggtatggaagaattgactaatcaattacaatctttatttcaaaatttaggaggacataaaaaaagtagtagacgtcttaaaattaaagatgctattgtattgctaacagaagaagaggctgctaaattaattaaccaagaagagattaaaaaagaagcaattaatgcagttgaacaaaacggcatagtttttattgatgaaattgataaaatatgcagacgaggtgattcttcaggtccagatatctctcgagaaggtgttcaaagagacctactcccattagttgaaggatgtactgtatctactaaacatggaatggttaaaacagatcatattttatttatagcatctggagcatttcaaacatctacgccttctgatttaattcctgaactacaaggacgtcttccaataaaagtagaattgcaagcacttaccatcgatgattttgaaaaaatcttaactgaacctacagcatctattacagcacagtataaagcacttatggaaacagaaggtgtttatattaattttacaaaggaagggatacgtaatattgcagaagctgcttggaaagttaatgaatctatagaaaatattggagctcgtcgattacatactgtattagaaaaattaatggaagatatatcattcaatgctagcgataataaaggtaatacgattgaaatcaattcaaactatgtagaagaacatttagatcaattaacatctaatgaagatcttggtcgttttattttataatttttattcaaaatatttatccattattattttttattaaaatggatgaatatttttttaaaaaatatttaaattaattctcaaattactattgaaaaaaaaaaataagaccttaccttaaaataaaacatttttaattttttataacgtaaaaaatatttaaattataaatatttttcaaaccataaaatattagaggattttttatgtcttatcgttctctctcatttataccaaattttaatgatcataatgttttttcaaatagattcaatcaaattgataaaatgtttagtactcttacaggagaaaaaccaatatctgatacaccgacatataatctatgtcaaataaatgaaattgaatatcaattaacactaagtattcctggataccaggaaaaagaattagatatatctgttcacaataaccaattatctattcaaggaaaaaaagaaaatagtgatactcaagaatgtaataaatggttacataaaggtatagtgtttaataatttttctttgaattttaatttagaccataaaattaaagtaaaaaaagcagagttatctttaggtctattgaaattagattttgaatgcaatatcccggaagaggaaaaacctaaaaaaatttctattaatgtacctaatgatactaaaaaaattgataaaaaataaaattaaaaaaatataaaatcactgcgcttataaaaataagcacagtgatctaactaaaaattattgagaataaataatgaatccatggattaatgcagacgttttgatggtaaaaaaatggactaaaaatttattcagtcttattttaaatgctcctatagaacctttttttgcaggacaatttaataaattagctctatataacagtaatcctttaaataaaaataaaattcagagggcatactcatatgttaacgctcctagtgaaaaaaacttagaaatttatattgttcgtgtgctcaatggacaactaagcaatctactatataatcttcatagtggcgataaaatttttatcaaaaaaaaatcatttggtttttttattatagatgaaataccagattgcgaaatactatggatgttcgctacaggcactggaataggtccctattgttcaattttacaagaaggaaaaaatattaatagatttaatcatattattttaacacatgcagtacgatatcaaaatgaactaacttatttaccactcatgaaagaattacgtcagaaatataatggaaaattacaaattcaaactattactagtagagaaaaacataaaaattctttaaatggaagaattccttttttattaagaaataaaatattagaaaaacatgttggtttttcaataaaccctcagacttcacatgttatgttatgtggaaatccttttatggtaaaagatacgtttttatttttaaaaaataatagaaatatggaaaagcatttacgtcgaaaaaaaggacatattaccatggaaaattattggtaaaataccttttctaaattctaacaacgatctaccggaaaagcgataacttcatgaatactttttttattcaaaattaacataattaatctatctaaacctattgctacacctgaacaaggaggtaagccataagacaaagcacttaaaaaaaaattatcgatttttcgtgttggaagattcatggaacgacgttctttattatctctaataaaacgttttttttgttcatttacatctataagttcgtaaaagccatttcctaattctattcctttaaaaaaaatttcaaatctttcagatatacgaggatcttttaagttaatagcagcaagagacgcttgttctgcaggaaaatgataaacaaataaaggtttttcttttcctatattaggttctatttttagcgtaaataacaattgtatcaatttatttaaattattttcagaatgagttaaatggtctaattttaattttttagatatttgatgcaattctaataaattagtacataagggatctatttttaaaaaatctataaataaatcttgataagaaactttatctgatttattacattttaatataatttgaaggaatatatctatttctttaataaattttttcatcgaacaaaaaggttgataccattctaacatagtaaattctggattatgataacgacctatttctttattcctaaaactatgacaaatttgatatatagatccgctttctgatgctaataaacgcttcatatgatattctggactagttgtcaaccataattttaactcatcaatattatctgatgaaatataatttgtttcaaatgatgttaaatgtacatctgtaactgttgaacgtgataaaattggtgtttcaacttcaagtatattttttttagaaaaaaataaacgaatattagaaataatatttgatcttttgattaaatcctcgatggaagcgcttgatttccagattttttttttcattttaattttctttaaaaatttattcgaattgataaaattaattactagtagaacaaaaaaaaataaaaaatatgaacaaaaccgcaatatatccaggtacatttgatccgattacatacggacatttagatattataacacgtgcaacaaaaatatttgatagtataactatcgcaatttctaataattttacaaaaaaacccatttttaatttaaaagaacgaatagaattaactcgaaaagttacacttcatttaaaaaatgtaaaaaaaatacttggttttaacgatttacttgctaatttagcaaaaaaagagaaggctaatattttaattagaggagtcagaacaatatttgattttgattatgaaataaaattagcggctataaataaacaaatttatccagatttagatagtatatttttactttcttctaaagaagtttcttttatatcttcatcttttgttaaagaaatagcaaaatataaaggcgatataaaaccgtatcttccaaaagaagcccattctgcattattaagaaaactaaataacgattcgattaagtagtgatttttttatcaaatatagtagggtatgttatataccctactatttatttttaacattatatgtctatttcaaatatataatatttatttcataaaatatgaatatttcattattggtgatgcatttggaggaagaatgatagttgcacgtataccaaaagatttatatttctgtatataattatcattttttacatctaaatcagataaattagtcgcaactaatttaacagaaccatcatctagaaaatttatcttataaatattccgagaatgtttaatttgatactgatcaatttccggatgttcagaaattaattgaagataagactgacgcagaaatttttgatttgcatatgtagaaatcaattgtcggaattcgacatttggtactattgtcttaaaatcttttagcattttatttcgattgttaacagaaattaaggcattgtttacaacaaaaagaaacggattagtatcgttcataaaatcgttatctaaatcattagatgattttaaaaattcatattttttttgaaagtgtttaattgtagattgaatattattaaatgaatttaattgatctgaaactgtccatgtactttcatcaatgaaatcattagcataagattcttgaatatttttattcattctttgtcgaaaattttgatccatttttaatatactttttctgccttccaaatcaaaattctcatctagtcttttaaaaggataaaaatcattttcatcttcaggttcaggtataggattggtaatttcaggaaatgaactttgatattcaggatgccgtggattattatttaatttattaacaatcttgatttttccttgatatctgattctttctataatagctctaagataaactttcgaagattcaataactcttttaagttgttcgatatgttcagataaagaaatagtcgcttcagaattcgaatctattttcgctctattctcgtctgatgaaaaaaatatttttttgaatgttgtaccattgaaaagatttatagtttctgttttgaaagtttgataggtggttataacagtattagtgattgttttaataatattttctgcaatttctgaaaagtcaaaatctaaagattttttactagataattctatttcattatcaaaaaaatttgaatggtgttgttcaggaatttttttttataagtgtattttgaataatttcattatcactattatcagtaatattgttattatttttttctaaattatatttttcaagaatgttctgttctatttttttttgaagtatatttaataaaattaaggattttttgtatgaattttccagatctatcaatttattttcatcttccaaatcataagtattttgatcgttttttttagatacagtttgattcttgtttgtttcaaacattgtttttatggcatctgtgtaaatatctatcgtattaggatgtgttttatttgattgattgggatttaataataaattgtgtaacataatattttgatcctattgtaaattattttttagtatatttttataaaatatttttttgaacttaaaatatataaaaaaattgtcaatgtaaattattaattagttttttttaaaagtcaattattaattttcaaaaataaaaaaaatagaaaacatgaaaatatatttaaaattcaaatcttacaataaaagaatatgtaaattacttcagttatttaaattagaacatgatcaaaactgttcgatgggtttgttgataaatcataactcattagagttatataatcgtgacaatgtaaatcaaaaacctataaaagttgattttacttcgaaaaaaaatcattatcgttgtcatcattttcgtagaaaaaatgaagttttatatagagtttcaggaataaaaaattcttattttcctaccatattagatgctactgccggtttagggaacgatgctttcatattttcttttttaggatgtaaagttataatgatagaacgtcatccaatagttgcagctttattaaaagatggattacagaggggatatcaagataaaaaaataggtcattggttacaaacaagattgcatttaattgtcaatgatagtttaaaaatgttagaaatccctattttgcaaccagatgtaatttatttagatcctatgtatccttttcatcataaaaaatctttacctaaaaaagatatgcaattttttagacaacttataggtcataattatgattctaaaaaattattagaagtttctcggaaattagcaaaaaataggattatcgtaaaacgaccttattatgcaaaacctttatctgaagataaagtgaatcatattgttaccacaagaaatcatcgttttgatatatatcaacctttttaaaaaataataggagtacatttctttaacacgtactcctatctaatcaaataattttacaaaaaaatactaaaaatcaatatttttatattaaaaataatgcaatccagtacaaaaagctagataatagcatagaaaccggtaaagttaatatccatgctaaagcaatatttttaatagtttttgtttgaattccatcaccatcgattaacatagttcctgctacagaagatgaaagaatatgtgtagtagaaactggtatacctgtataacttgcaattccaatagaaaaagaagctgttatttgagctgacatagcttgtgcatatgtcattcttttttttcctattttttcaccaatagtaacaactatacgtttccaacctatcattgttcctattgataaagatagcgcaacgattaatataatccacataggcgcgtactcaattgttttaagtattacttttttactgtgtatcagaaaacgtttatctttggaacagatatcagaagaatttacttttttatcaattgaatcagaaatacataataaataatgacgcaattgaaatctttttttaatgcttaaatcgttatagttagatatattttttaataataatttagtatttttaatattttttatagaattgtaagattgagatcttacaactaaattattgatttcctctttattttttataatatttgatttttttatatttttttctaaaaaatatttttctaaatgattaagtgtatgttttgtacagtttatttcatatttattagtatttaaatttactaagaaagaagagggtacaattcctattagtacaagcattattaatccaatgcctttttgcccatcatttgcaccatgagcataacttacaccaatagatgaaagaattaatgccattctaattagaaatggtggtatttttttaccatctttttctttacgctctaatggtgtcatatgaatgcgataaaaaattttattattatttagataatatcgtagtaaaaatattaaactaccagctattatgagcccaataataggagaaaaaacaagcgataaaaaaacacttgtcattttaggaatgttgaatgcatctactaaagacgaatctgtaacgaaggcattagttaaacctattccgataattgctccaataagggaatgtgaacttgaagcaggtaaacaaaaataccatgtagatagattccaaattatagctgctaataacattgaaaataccatagcaagggcattttttgaagtagcatttaacaataaatcatttggtaataaatgtacaatggtataagcaacagttaaaccacctagtaaaacacctaaaaaattaaatatacctgacatgataactgcaacatgtgcagacattgctcgagtatatattaaagttgataccgcatttgctgtatcatgaaaaccattgatggcttcataaaataacacaaaaaatagagctaaaaaaactaataaactatgattcaaatcagaataagaaaataaatgtagcataatctttaagccattttgatgaattgaactaagtttattatctgtgagaaactatgtttgaggaaagtaaaatatcaaatttattttacataaaactttatagaatataaatgtatcgattttagtcgtaatagtatttttataaaaaaattaaaaatatttatttttaaaatttttttgttttaatttaaaagataaaaaaactccaaaaaataacattgttataataaaaacagaaattccaagccactgcatatgaaaccaaaaaaaaccaccaaatgtaccaaatacactggaaccaagataataaaaaaatagatataaagatgtagcttgaattttagcaatattcgaatatgaaccaacccaactactagctgtagaatgcgatgcaaaaaaaccacctgaaaatattattaatcctaagattattataaatagttgattatactgtgtaataaacaaacctattatcatcaacattaatgacacaataagaatattattgcgattatatttattaatcagaacaccagctttaggtgaactatatactccagttaaataaatagtagatagcaatcctatgctggattgacaaagaaaaaatggttctaacatcaaacgataaccaatataattaaaaatagtaacaaaactgcccattaatataaaacctatgataaacaaaaaaaatagtactctattttttaattgtaaataaaaacgatgtaaacatttatgaaaattaatagaaacagataaaaaatttttagaagggggtaaaaaatataaaaaaaaacaagatgatataaaagaaaataaaccaattaccattaaggaaatgctccaagagaatttttcggctaaaatactacttaagagtcttcctaaaaaaccacctattgtatttccactaatatacaaacccatacaaaaagacaaagaattagggtgtatttcttcactaatataggtcatagcaacagcaacaacaccacttagtgctaaacctgtcaatgctcgtagtaaaacaatacttatccaactagtcatcattgaacatatcatagttaacattgctgctataaataaagaagtagacataattgattttctaccaattatatcagataatggtcctgtaaatagcatgcctaaagacatggttatagtcgcagcggacagagctaaactactttctgccggagtcaaataaaattgtttggaaaacattggtaaaattgattgtacacaatataagatcgaaaaagtagcaaaaccaccagaaaaaagagctaaaattacttgattaaatttttttgtgtttttttttatatattgtttttctaataattgttttttattttttaataaagtcaaaatatagcctctttgtaagtaaaaaaatagtttttatatatatatataaccatcatagacatgttttgcaggtcctaccatataaagaggagttccaaaacctttccaaattataatcagctttccacccaataattcgacatgaacagtgtcagaaagtaatttttgcgcaatacctactgcaactgcagcacaagccgcactaccacaagcttttgtttcacccacattacgttcatacactctcaatttaatatgttttttatttaaaatttccataaaacttacgttaacaccttctggaaatataggatttttttctatactatcgccgataatattaacaggagcatttttaacagattgtactttaataatacaatgaggatttccaatagatactagattacagatcaaattttcattcataagttttattgaaaaattattatctaaaacattttgtaatgaagataaattataaaatttaaaatcaggttcattcatgtttactttgatcatattttcagttaaaaattcaatagttaaaggtttttttttagtactaattaaaattttctttttattagtcaaacctttaagcaatagaaatagaccaaagcaccgagcaccatttccacactgttcaacttcattgccatttgcattaaaaattcgataatgaaaatcagttagaagagaatttgatttttctacaagtaataattgatcaaaaccaatgccggtatatcgattagataatttttttattatatgtgatgttaaaaagacattttttttaatgcaattgataaccataaaatcattcttcaatccatgcatcttagaaaaattgattttttttttatttttatagtatgaatccattttttcctcaaaataataattagattgttttttttgaaaatatttattcgtaaatactaacattttaataatgaaatctcatattttaatttaattaaaataataagatgatattttttatataaatttgattatttttattttttataatttgttataattaaaaattaaatcaaggactcgtttcatgaaaaaaaaattaaacaccaaaaaagagaataacaacttttatatattagtaaatgatttgtttttaaaaatagaagataatttaaatttgtatgaaaatgaaatcgatattgattatgaaattcaagactatgtcatgacgattactttttcaaataaaactttaattataattaacaaacaagaaccattacagcaaatttggctagcaacaatgcaaaatgggtatcattttgattataaaaataatcaatggatttgtaatcgtagtaataaaaatttttgggagatatttgaaaacgcatgttctattcaatcaaataaagatttaattttttgtaaaaaataatatatattaaatccaaaaaaatatatataaacatcaaaaaagataattttttgtgtcttttaaaaataaaaaatatttttatttaataaaattataaaaaatgcatctatattaatacgaatcccaatatgtacaataaaacattgagaattgctaccagaaaaagtcctttagctttgaaacaaactaaatacgttcaaaaaaaaatactatctttatatccagacttaaatatcaaattagttcctattgttactcatggagataatattttaaataaatctctttcaaaaattggaggaaaaggcttatttattaaagaactagaacttgctttacttgaaaataaagcagatattgctattcattcaatgaaagatcttccggtaaaaattacaaaagaattatgtttagttagtatatgcaaaagaggaaatgccttagattcactagtatctaataattatcaatcaattaatcagctgcccaaaggtgctatagtcggtacgtctagtttaagaagacaatgtcaattaattacttatcgaccagatttaattatttctcctttaagaggtaatatagaaactaggatagcaaaattagatcaaggaaaatatgatgcaattattttagctactgaaggattaaacagattaagattaaaaaatagaattactcagatcatacctgccgaattatctcttccttcatgtggacaaggtgcaattggaattcaatccagattgcatgataaaaaagtattattttttttgtctcgtcttaatcatataaatacttttattgaaataaatgcagaaagagctttttgtagaaaactagaatcaggatgtcagattcccattggaagttatgctattttgaaaaaaaataaaatttggttaagaggattggtgggatcacctaatggcaagattatattaaaaggagaacgaataggttgttataatacaggagaaaaaatggggtattcattagcagatgagctgcttaaaaatggagctaaaaatattcttaataatcttcatattaaacaatcttattgtatatgaaaatactagtaatacgaccttctcctacaggagaggaattagtatataatttaaataaaattggtatatcttcttggcatttttctttatttgatttttatccaagttttagtccaattagtttatcaaaaaaaattaatgaactatatcaatccaaagttattctcgttttttctaaaaaggctatctattatacaaatttatatttaaaaagtaataatttacaatggcctcttcatgcaaaatattatgcaattggaaaaagcactgctctttttctttttaattatattaaaaaaaaattatttttcctaaaaaaaaagaaaacagtgagaatttattgaaaataatcaataaagacaaaataaaaaataatagaataattttattacaaggggaaaatggacgaaaattaataaaaagaagattagaaaaagaaggatttaaaatttgtctaattgaatgttataaaagagtcttcaaaattttagatactaatatggaggtaaaaaaatggcgttcatataaaatagatactttagtagtaacaaatagcgaatctttacatcagttaaaaaatattatttctagtactaatcagattcaatggttattcggatgcaggatttttgttgtcggtaaaagattgtttcgtatagcaaaaaaattaggatggaatgatgtaatagtttcaaaatatgctaataatgattcttttatcaaaaaaataaaagaaacgaattttaaaaattaattttttggtcggcgaaagaggatttgaacctctgacctactggtcccaaaccagttgcgctaccaagctgcgctattcgccgttttcaaataaaaaaatataattttcttattttttttggggtggctaatgggacttgaacccatgaccactggaatcacaatccagcactctaccaactgagctatagccaccaataatttaaaaatttttttataaaaaatgcgctcgacaggatttgaacctgatacctctaccttcggagggtagcgctctatccaactgagctacgagcgcatcaatatgaaacaaattagattttaaaattaataatcctaattgtccagctttttttaggaaatttatatataataaatattattcatcattttattatgaaacactttatttttttaaaataaaatatttcttaaaaaaataaattattttttattagatataaatatgaaaattttttaaaatttaagagcgtttcatcatatcaaaaaattcatcatttgttttggtcattgcaagtttattaagcaaaaattccattgcatctatttcactcataggatgaataatttttcttaaaatccacattttttgtagttcatctggcaaagttaataattcttcttttctagtaccagatcgattataatcaatagctggaaaaacacgcttttctgcaattttcctagataatggaagctccatattgcctgttcctttaaactcttcgtatattacctcatccattttagaaccagtatcaactaatgcagttgcaatgattgtcaaacttcctccttcttccacattacgcgcagcaccaaaaaatcgcttgggtctatgtaaagcatttgcatctactcctccagttaatacttttcctgatgcaggtactactgtattataggctcttgctaaacgagtaatagaatcaagtaaaattattacatcttttttatgttctactaatctttttgctttttcaataaccatttcagccacttgaacatgtcttgatgcaggttcgtcaaaagtagaggcaactacttctcctttaactaatctttgcatttcagtaacttcttctggtctttcatcaatcaataataccattaaaacgcaatctggatgattataagcaatactttgtgctatattttgcagtaatattgtttttcctgcctttggcggagctacaattaatcctctttgtccacgtccgattggtgatgctaaatctaatactcttgcggttaaatcttcggttgatccgtttccacgttccattcgtagtctagaattggcatgtaatggtgttaaattttcaaataatattttgcttcttgcattttcaggtttatcataatttacttcgtttactttaagtagagcaaaatatctttcgccttctttagggggtcttatttttccagcaatagtatcacctgtacgtagattaaatctacgaatctgactcggtgaaacataaatatcatcaggaccagctaaataagagctatctgcagaacgtagaaagccaaatccatcttgtagtatttctaaaacaccgtcgccaaatatatcttctccactttttgcatgttgtttaaggatggcaaaaataatatcttgtttacgcatacgcgctaaattttccaaccccattttttcaccaagagtaattaattcagacactggcatatttttaagtgcggtaagattcataatggtgggttcttagtaaaatcggggtatatctcaaaataaaaattatgatataattttaaaatttattgaaaaattttaaataaaatgaaatttttgatgtatctaattaactgatttcaatgattttcagttaatattttcatctaaaaattctttaagttctagtttggaaactgcacctactttagttgcaagtacttcgctattattaaataacaatagtgtggggatacttctaatagaatatactggagcagtatttggattctcttcaatatttaattttccaacaataactttattagaatattcttttgatatttcttctaaaataggcgctaaaattttacaaggattgcaccattgagcccaaaaatcaactaaaaaaaaactttttgagtttaaaacttgttcttcaaaattttggtcagttagttcgattattttattcattttaatgtatttgctcgatcgtaagaaatgttaaataaataaaatttaaatttttgtaatttaaaagtgtattccaagataatatcatttttaataattttttaaaactaaatttaaaaaaattttatttaaaattatttttttaatatttgttttaaattatatattttcaattttatatcttcttttttttagatgaatctaaaaaatttttttctcccattttaaatcttcttgaggtagttcaaataaaaatctactaggaagcatatctaaaatttgaccatattgagtgcgtttgtaacaataagtaaaaaacaattgtttttttgctcgagtaattccaacataagttaatcttcgttcttcttcgatattatcattatcgatacttttttgattaggtaaaattccctcacacatgccaatgataaatactgcaggaaattccaatcctttagaagcatgtaaagtcattaattgtactcgatcttgttgttcttttataatattatcatctaaaatatcacggattgtcatccgtgtaacaatttgaaataaagtcattggtttttcaaaatcatctcctttaatcatatttttaaaccattgtgataatgtatgaacattatttatactatttttaattttattaggatcttttaaaaatttagataaccatttttcatactcaagatcatcaacaatatcatctataatattagatggtttcaaacaagaccacgcagtgaatttttctattttagagataaaatttttaattttttttatagtattttcatttaaaaatttttttatttctatattattactagcttgaaaaagacttacatgttttttattagcccattcttctaatttttttaatgttgtttttcctatttgacgtgaagggatatttacaattctcataaatgcgtgattgtcgtctcgattaataacaacacgaagataacttaataaatctttgatttcaggacgtgaaaaaaatgaggatttttcagaaatattatatggtatattttcttttattaaagctttttcaagaattctagattgataatttccacgatataaaatagcaaaatctcggtattttattttttttttagcatattgagatataatttttttaactattttttgagcttcattttcttcatttttacctattaatacttttattaaatttccatatttaagttgtgaaaatagttttttttctaaataatgtatattatttgcaataagactattcgcagcttttaatattcttcctgaagatcgataattatgttccattttgataatttttaaattaggaaaatctttttttaataaaaaaatattttgaggatttgctcctctccatgaataaatagactgatcatcatcaccgactaaagtaaaatcagaatttttattagcaagcattttaataagttcgtattgactattgtttgtgtcttgatattcatccactaataaataagagatctttttttgccaacgtatttttatttttttgttgttttttaataataatgttggcatgcaaatcaaatcatcgaaatctaatatattagctttataaagataattagtatattgttcataaacatatgcaaaatctttttcttgactagattttgctaataattgaacttgtaaaggagtaagaaatttatttttccaataagaaatcataaaatttaatttttttaataattgaatattgtttttgatttcttttttacatattttttttaataaaagtatttgatctttttcatctaataaagtgaaattgttgtttaattctaacgcatcaatttcttttttaataatttcaagtcctaatgagtgaaaagtagaaataattattttttttatttctggaatatttaaatatttcgaaagacgtattctcatttcataggcagctttattagtaaaagttactgcggcaatattatcaggttcatattggcaatgattaattaaataaataattttattaataataacttttgtttttccagaaccggcccctgctagtattagacagggcccattagtgagttcaacagcatttttttgagaaaaatttagagacataaaatattaatatttaatagatgaattgtattgtttaatttataaatagaaacttatatattttaatttttattttgcaactgttattgctttcatttttttcatatagtttcttaatgtgcatccgataatttctataggatgattctgtattttttgatttatcctataaagttcaatattatttactgattgatgagataatgcgcaaccaagatcacttttgttgagagtagatataaattcttttaaaataggatatgcagattcagaaaaaagatagctaccatattcagcagtatctgaaataactttattcatctcatataatttttttcttgcaatagtattggcaatcaatggaagttcatgtaaggattcataataagctgattcttctttgatacccgtttcaatcattttttcaaaagataattcgataccagattttaatattgcgatcatgagtataccgtgatcataatattcttgttctggtattttttcattataaacaggagcagtttcaaaagatgtatttttagttttatatcgccaattcaataactttaaatcctgattttcccaatctttcatcatttcattagaaaattctccagaaataatatcatccatgtgtttttgaaagagtggagatagtatttttttaatttctttagaaagtttataggctcttatttttgaggaattagataatctatccatcattaaggtgatacctccatgtttaagagactccgtaatagtttcccatccattttgtattaattttgccgaatatgctggattacatttttctgtaatcaacttttcatagcataataatgatgctgtttgaagcataccacataaaattgtttgttcacccattaaatctgattttacttcagctataaatgacgattcgagcacacctgcgcgatgccctccagtagaaaaagcccaagcttttgcaacttctaatcctattttattaatatcgttttcatggtgaacggcaattaatgtgggtactccaaatcctcttttatattcttctcgtacttctgttcctggacattttggcgctaccataataacagtgatatcttttcgtattttttctccaaattctacaatattaaaaccatgagaatatcctaaaacagcgttttttttcattaatttttgtaattttttaatgacactatgatgttgtttatccggagttaaattaattactaaatcagcatcgggtattaatgcatcatagtcgtctactttaaaattattctcaatagcattaatccaagattgatttttattggcaatactatttttttttaacgcataggaaatatttaatccagcgtctctcatatttagtccttgatttaaaccttgagcaccacaaccaacaataactatattcttattttttaatatatcattttttttgttaaattcttcttttttcatgaaacgacatttatttatttgattaattttttgagtaaaatttagtgtattaaaataattcataataaaaattcctatgttttaaaaatatattttaaactagtaatatattaaatattagatatttttttgtaatctctaactgctccttgatcagcactagttgaaaagaaagcatatgcttttaaagcagaagaaatatatcttttacgactatggggtttataagataaaggtccctttgattcttcttgaagaatacgatgagagagttctttttctgttatgtttaaatggatggttctttcaggaatatttatattaataatatcaccattttttaccaaggcaattattcctttatttgcagcttcaggtgaaatgtgtcctatagaaatacctgatgtacctccggaaaatctaccatcagtaattaatgcacatgttttatctaaattcatagattttaaatatgtagttggatataacatttcttgcattcctggtccccctttcggaccttcgtaacgaatgacaataatatcacctgaaattatttcaccatttaaaatactactggctgcttcttcttgactttcatatactttagcaactccagaaaaaatataattctttgcatctattccagcagttttaattatacagccatttttcgctaaatttccatataaaatagctaaccctccatcttgactgtaagcatgtttacaagatcgaatacaaccgttttttcgatcataatctaatcttgtccatctaaaattctgagaatatgcttttgttgtacgaataccaccaggtcctgcttgaaacatatttataacatcaggattatttgtagaaaaaatatcgtattcatctaatgtttcttctaaatttaattgtagtatgtttcttgtatttttatgaagcaaattaaaacgattcaattctcctagaatacccataacacctcctgcacgatgaacatcttctacatgataaagtgaagtacttggtgcaactttacagatatgaggtatctttttagataacttattgatattagacattttaaagtcaacttttgcttcttgagctgctgctaataaatgaagaatagtgttagttgaacctcccattgcaatgtccaacatcattgcattttcgaaagactctttattagcaatatttcttggtaaaacatttgtattattttttttatagtaatcttcggtaatttttactataatttgagctgatttgataaataaatttttgcgatcaatatgagtagctaatagtgtgccgtttccaggtagagccaaacctattgcttctgttaagcaattcatagaattagctgtgaacatacctgaacacgatccgcatgtaggacaagctgaagcctcaatatctttgataaaatcatctgatatatgagattttcctccattaataatagcatcaactaaatcaatttttattgttttattatttttttgtattttaccagcttccattggtccaccagaaataaaaactgatggtatatttaaacgcaaagacgccattagcatcccgggtgttattttatcacaatttgaaatacaaatcattgcatcagcacaatgtgcattaactacatattctatagaatcagcaattaattcacgtgatggcaaggaatataacattccagagtgtcccatagctattccatcatctattgcaatagtattaaattcttttgcaactccgcctgatttttgaatttccccgcaaataagtttaccaacttcctgtaagtgaatatgtcctggaacaaattgagaaaacgaatttactactgcaataattggttttgtaaaatctttctcagtcatacctgtagcacgccatagtgatcttgctccagacatatttctaccctgagtagttgtgaaagaacgatatttaggcattttagagaactccaaaaataaaaattttacaaaaactatttaatatgaatgatattataaaaagtttgtatttgaataaattttttatttttattgtaatagaaaatttttattggaaatatatatttttttagaaattagcattaagaagaagtaggaattatattatttatataatagtgatattgatttattttgtaataataatgattattaaaaaattttcaattggtgaattttttcaggggtggaaggatttgaacctacaactttcggttttggagaccgatgctctaccaaattgaactacacccctaataattataaattattatcaattatgattatattattaatataaataaaagtctagtgtgtattttaaaatttctaaaaaaattaaattttagtaatttttagaactaaaattttattaaaatgttagaatatatcttttaaaatattattgaaaggtaaatttttattatgaaaactcctatttatttagattacgcagcaactacaccagtagagtttgaagttgcaaaaaagatgatgaattatttaacaatcgatggagtatttggaaattcagcatcacgttctcataaatttggttggaaggcggaagaagttgttgatattgcacgcaatcaaatatctgaattaattggagcagattcacgtgaaattgtttttacttccggtgccactgaatctaataatttagctataaaaggtatagctagctttcaccagaataaaggaaagcatattgttactagtaaaacagaacataaatctgttttagatacctgcaggtatttggaaaataaaggatttactgtaacttatcttacacccaaaaataatggtattattgatttaaataatttaaaaaaaaacataaagaaagacactattctagtttctataatgcacgtaaataatgaaattggtattatacaagacattaatagtatatcgcaaatctgtcgaaatcatggtgttttttttcatgtagacgcaactcaaagtgtaggtaaaataccaattgatctaaaaaaaatacctatagatttaatgtctttttctgcacataaaatttatgggccaaagggaattggtggcttatatgttcgtcgaaaaccacgtgtacgattattatctttaatacatggaggcggtcatgaaagagggatgcgttcaggaactttaccggttcatcaaattgtaggcatgggcgaatcatttgtattggctaaaagaaaaatacatgacgattttattcatttaacaaaattaaaaaatattctttggaatggcattaaaaatattgaagaggtatatttgaatagtgatttacaacaaggtgcacctcatatattgaatgttagttttaattatgttgaaggtgaatcattgattatggctcttaaagatttggctatttcttccggttctgcttgtacttctgctagcttagaaccctcttatgttctaaaatctttaggaattagagatgaattagctcatagttcaattcgtttttctattggaaggtttactacagaaaaagagattatacatgcaataaagttagttcacaaatctattcatagattacgtgaactttctcctttatgggaaatgtttaaatcaggagttgatttaaatagtattgaatgggatcatgtttagacaaaataattaatacaaggtaatttaacaatggcttatagtaaaaaagtaatggatcattatgaaaatccacgtaatgtgggatctttttctagtactgatcttaatgtaggtagtgggttagtaggtgcgcctgcttgtggtgatgtaatgaaattacaaataaaagttaatgaaaaaggtattattgaagatgcttgttttaaaacatatggttgtggttctgctatagcatcaagttcattagttactgaatgggtaaagggcaaatctatagaagaagccgaatcaatcaaaaatactactatagttgaagaattagatctacctccagtaaaaattcactgttctattttagcagaagatgcaattaaagcagctatttctgattataagagaaaaaaaataaattaactttataattatttggtgttgaaagaatattttctttcaacatattatattttatttttacaccttatattattgaatttgatttaggtgacttatgaattattttactttatttgatttgcctagaaaatttaacattgacaaaaaattactttctcaaaatttttacaaactacaattaaaatttcatccagatttatttataaatgattctgaatctaaaaaaaaaataattctagaaaaatcaatacaaattaataaaggttataaaaccttaaagaattttttaaatcgagcaatatattttctttgtctaaatggttatgaagtaaaaaaagaaactcttttattaaaaaataatgattttttaattagatatttttctttatatgaacaattagataatttaaaagagaataattttaataaaaaagaattgaacaatctcgaacaaataatacaaaaaaaaattatatattgcaaaaaaaaaatagaattagagtttgaaaaaacaagatataaaaaagtcattaaaataatttcagaattacttttttttgaaaaaataaaagacgttttgaaaaaagaatacaatatatatttaagccaaataaattaggatatttttatatgattttttttaaaaaaaaacacgataaaaaattattattaggtattgatttaggtacgacttattctttggctgctacagtacgagaaaaaagtgtgattttattgctagataaaaaaaaacgttatttattaccatcagttgttcattataagaaaaataaaatatcagttggttggaaagccctagaaaatattactgaagatcctactaatacgattagttctgttaaacgtttattaggtcgttctattaattttgttaaaaaaaaatttcctatccttccatatttaatagaaaaagacatccatgaaggaattttttttcgtacaaattttggtaatattactcctattgatgtttctagtcatatattaaaaaaattaaaaaaaagagcggttttattatttaatcaagaaatagatgcaagtgttattacagttcctgcatattttaatgattttcaaaaaaaagaaaccaaaaaagccgctgttttatccggaataaatttaataagattattaaatgaacctactgcagcagctgtagcatatggtttgcaaaaactaaaaaaaggaatcgttcttgtatatgacttaggtggtggtacttttgatgtatctatattaaatttaaataagggaatatttgaagtattagctactagtggagattctaatctaggtggtgatgattttgatgatgctttagcaaagaatatctataaaaaatcaaatttacaaaatagatgcaatgattttttccaaacttctttgcttcaaattgcaaagtcaacaaaattaaaattaacaaaatatgaaaaagttgaagttcatttttttgattggaaaggttacattactcgtgaagaatttaatttaattatcattgattttataaaaaaaactttattcatttgctctgatcttcttgaagaaatcaatttatcagttgaacaaattaaagaggtgatcatggtaggagggtctactcgtatcccactagttcatacggaagtttcaaaatttttcaagaaagatctattgaaatcgattaatcccgatcaagttgtggcaataggtgctgctatgcatgttgatatgctttttagtagcaaaaataatactaaaaataaagttatattgttagatgtaatgccgctttcattaggtattgaagttatgggggggtttgttgaaaaaattatttttcgaaatacttcacttcctatttcaaaaacgaaagagtttactacttataaagataatcaaacatcgattcttatacatattgtacaaggagaaagagaattagtaaaagactgtatttcattgtctcgttttgttttaagagatattaaaccacaaaaagctggattagtaagaattttagttacatttcaagttgatacagatggactaatccatgtaaagattttagaaaattatagcagtaaagaaaaaaaaattattattgataataatattacattaaaaaatttaaatatttctcaaatattgaaagattcattaaaacattcaaaagatgactattattttagagtaaaagaagaaaaaaaaatcgaatgtgttcgtactttagaaattttaaacaaatctttaaaaaaacatttaaaattaattagtaaaaaagaactgaaaaaaataaaatatacacaagaaaaactacaaaaatctatacaagaagatgactatttttctatgaaaaataatttacaaaaattagatgaagtaagtaaaaattttttttcgttacaattaaaaaatgccattgattgctcttccattaaaaatattttaaaagagaacatataatgcctaaagttttatttttacctcataaaattctattacccaagagtattgaatgtgaagcacaaacaggagaaacaatattaactgtagcattacggaataatattaaattagaacacgcatgcgaacaatcatgcgcttgtagtacatgtcactgtatcataaaaaaaggatttttttctctttcaggatggtctgaaaaagaagatgatattttagataaagcttggggtcttcaatctgaaagtcgtttgagttgccaagctgttattggaaagagtgatattgaggtagaaattcctctatataatttaaattatactgtagagtactaatttttatttttaacgtaaggattttcattatctttaaactgtatttgaatgggggtaccttttatcttaagagttttgtagaaaaaatttatcaaatatcgtttataaggtaaagataaatatttaacttgattgccatgtataataattttaggtggattagaactgcccaaatgtgcatattttaattttattcgacgtccttttataattggtggttgatgttttttaattgctatatgcatggtttttataagcgttgatgtgctaatctttcttttagaatcttcataagattctttgatagatttaaataattgaaatatcccttttttatataatgctgatataaagtgtatttttgaaaaataaagaaattttaatttacttttaataagttcttttatttttttcaattctactgaattaaatagatcacatttatttactactacaacaattccctttccagaatgaataataaagtcagctaatgataaatcttgatgacatgtttgaagacttgcatctattattaacaatattacatttgatttttcaatagtttgaagtgttttaatgattgaaaatctttgaaaatcattaatttttttcttttttttagatgctcctgcagtatcaattaaagtataattttcgtaattatatttaataggtgttgatatactatctaatgttgtaccaggggtattagacgtaatcattctttcttcttttaatattccatttattaaagtagattttccaacatttggtcgaccaataaaagctacttttattgctattttttttaattccgtgtctttatatagattttctgtgattttttttttaaatttttcacttatccaaggaattaagtatctgtttataagagtatttattccttgattatgactagcagaaattttttggattttttcaaatcctaaagaataaaattcattaattttagatgcttcgttaatgccatctattttattaattactagaatggtttttttttgatattttcttatatttttagaaatttcgtattcttgaggcattaatccgtcacgagcgtttactaaaaataaaattaaatgagcttcttttatagctattaatgtctgtgcctgtgcttgtttttctatttcgtttaatttgatatccaaacctgccgtgtcaattaaaatgatttttttattcgattgtaatttgcaatatccatattgtctatctctagtaatacccgggtaattagctaccaatgcatctctagtttttgttaagacgttaaataaagtggattttcctacgttagtacgaccgattaatacaatgataggtatcatgtttaatacacacctttatttttttgataattttattttttatagatgaatttaatatttttcatgtttgcatttattttttctatattaaattaattttgttcttttaattcattaagtttcatattaataatttctttagatgcattagaatcttcaataaaaagactttttttccaagattttattgcttcttttttattgtttatattaataaatatatcacctttcatgtgttcaattatattcttccaattatggttttgaattgtctcaagaatattcattgctttattgttttcatttttttgtatttgtatttttgctatgtttattttcaaaaggttctttaaattttcttctttggtatattttaaactattatttaattgcagcaaggccttatctagattattacattcaacatatttttttgctaaagataaagctgttaaagtcccataaatactagtattttgaacgataaaattttctacttcatataaatttttagatttttttttgtttattttttttataattttttcatattttaatgattctaaattttccttattaactaaagaaaaatacttccaattaaataaaataagactaatgataagaaaaaataaaataaagaaaataatattttttttcgatatattaagcatttttatctctattaagttcaggtgattttttaatttaaaaatgtagttattttgcaattcaatttgtgatcagaaatgtttttttcaccatgaatgcaataagcgtctttaatattacaaatattcagtttaattaactctaaaataataacatataaaaaagttatccgtatgaaaatcactaattgtacacagttaattaatagaataagttcttttataatcaatgcttcagactac

SEQ ID NO: 2 - DNA, 7786 bp, Buchnera sp.
atgtaattatttttttaaaaaaatagcgaagtttttagaaataaaaaacttcgctatttttttttaatttaacaagtatgtttttatttatttttttatataagttttaagaatgttattttgcatttatttatataagaagcatttattaaaaaaaacagtatgcatttatttattttttcaataaaaaaatgtgattctaatgtttttttttattgaaaaaataaaataagatgttttatgataaaaaaaaagggggggagataattttacagtggatttaagaaacaaaaaatatgcgaataaacgcatgcctttaagaaagaataaatttaaataaaaattttaattatcaggataagtgtttgtagctatcttgcgtaaataataatagcttatattaacttgtttctttaatccattaggccctaatttagttaattcagtaatagagtatttggctactaacgctcgaagaatagtttgtctggcttctttctcatctaatgaaatcaagcgttgtgcatttctcttttttttataaaaagcatgcttagaaattctatattgaaaaatatttttaatttgagtatctttagaacgtcttttagcatcaatcatggttattggtttaaaacctttactaatgagatttttattgatccaccctaattgttgtttcttagcatccattaattttttttcagaaacaccaaagagcataaaaaacaatggggttaatgtgatcattttgggcatataattgcctaatattttatcccatgtttttttgcaagtaacaaaacccataggttccataaaattagtaattaatctagaagcacgagtaatagatttattacctgctttagacaaggtagacaaaccacattcatcagataattgttcaactgatgcttgaaccaaatcagaagaaatattaaaatggtaaagcatagctaaaaccatggctctcatagcacatgctcggtgttcatttaatcttctaaatctttttacgggaaaaccaattttaatatttttgatctgtaaaatataatttagttcgcatcgagctacatctatttctgatgctcttttcattgcataacaaataaaagatggcctacgtttattatttttaggtggtgtaaaaaatggattgggattatttatatagcattttcttattatcataacatgatacttaaaatagtaagtgggttcattttttatatatttcaaatatataaaattttatttttattctttcaataattaaatttttttatatttaagaatatatactttacttttatttttttttatgaataaatataatttataaaaaataaatatatttttaacatacattttgattattttcaacgataacttactaaaacttaaaagttttatcttaactttcttaaattaaataaaatatatttataaattcaatctatatcaaaaacaatattttttattaacaattactattcaggttaaaaaaatggaaaaaattattgaaaaaagtatatatgcctctcgttggttaatgtttcctgtatatgtaggtttatcgtttggttttattttattaacattgaaatttttccaacaaattgtatttatcatgccagatattgtggctatgtcagaatcaggtttagtgttagttgttttgtcattaattgatattgcattagtaggtggtctattagttatggttatgttttctggatatgaaaattttatttctaaaatggatatacaagataatcagaaaagattagggtggatgggaacaatggatgttaattcaataaaaaacaaagtagcatcttcaatagttgctatatcttctgttcatcttttacgtctttttatggaagcagaaaaaatattagatgataaaattatgttatgtgttattattcatttaacttttgtattatcggcttttggaatggcatatattgataaaatgagcaaaaaaaaacatatccttcattagtttttgtttaaaaaaaatttatttttttttaaaaaaactaatataaaagtatattgttcaatatatgatttatcaaaaactcttcttttaaaaaaatattttacttttaattaagtgtatttagtgcctagaaaaaattatatatataatctaaaaccattttttaatccatctaaaaatgaaagaaaaaaatctacatttatttgttatgcaatgaaaaaagtatcagaaatagacgttgctagaagtcatttaaatcgtgcattattaccaatagatcctaaaactggtaatgttttgcctcgattcagacgattaaataaacatcgagcatgtgctatgagagctatagtacctgctatgttgtattattttaatattaattctaaattagtcgaagcttctattgaaaaattagcagatgaatgtggattatctactttatcagattctggtaataaatccatcactcgcgcttctcgtttaataagtgagtttttggaaccaatgggttttgttaaatgtaaaaaaataaatagtaaatcaatgagtaattatatacctaaaaaaatttttttaactcccatgttttttatgttatgtggtatttcaccatcagaaataaatcattttttatcaaaaaaaataaaaccattaaaaaaattaaaaaaacaagaaaaaagtgcatttatttcttttacagatatgaagattatatcgcaattagatgaaagatcagctagaacaaaaattttaaatgctttaattaattattacacggctagtgaattaacaaaaataggtccgaagggtttaaaaaaaaagatagatattgaatatagtaatttatgtaatttatataaaaaaaaatcataaaataaatttatacaataaaaatttcataagacatcatatacaaaattattttgtatatgatgtcttatgaaatttttattgtataaatttatttttatccaataaaacattccattaccttaatttggaaaaatttttatgaaatctaaagttgttatttttgataccacgctacgcgatggagaacaagcattacaagcaagtcttagtgttaaagaaaagttacaaattgcactatctttagaaaaatgtgggatagacattttagaaataggatttcctgtttcatcacccggagattttaaatcagttcaaactatatctaaaaatattaaaaatagtcgaatatgtagtttagctcgttgtatagaaaaagacatcgatgcagccggagaagctatgtcttcatctgattcttttcgaattcatatttttttagctacttcaacacttcatatggaatctaaattaaagaaaaattttaacgaaataatagatatggctgttttttcagtaaaaaaagctttacgttatactgatgatattgaattttcttgtgaagatgctactagaactacaatggataatttatgtcgtattgtagaaacattaattaaatcaggtgtgaaaacaattaatatccccgatacagtaggatatactgtacccaacgaattatcttgtataataaaaaatttgtttgaaagagtacctaacattcataaatctataatttcagttcattgtcatgacgatttaggcatggctgtgggaaattcaatatcagctatacaggcaggtgctagacaaatagaagggactataaacggaattggcgaaagagctggtaatacagcattagaagaaataattatggctataaaagtaagagaagatatcttaagtgtttccactaatattaattataaagaaatttatcgaactagtaaaattgttagtcagatttgtaatatgccaattccatctaataaagctatagtaggtagtaatgcgtttgcacattcttcaggtatccaccaagatggtgtattaaaaaatagaaaaaattatgaaattatggaaccaagtagtattggtttaaaagaagtaaaacttaacttaacctctcgttctggaagagcagcagtaaaacattatatggatgaaatgggttataataatagtgattataatatagatgaactttatactgcttttttaaagttagcagataaaaaaggtcaggtttttgactatgatttagaagcattagcttttattaataaacaacaagatgaatgggaatacttttctttgaaatttttcagtgtgcagtctatttctaatagtttatctactgcatcagtaaaattattatgtggcaaaaaaacatacacagaatcttctactacaagcaatggaccagttgatgctatttaccaagcattaaatagaattgcatgttttcctattatattacaaaaatttcaacttgtagctaaggggaagggtaaagatgcgttaggtcaagtagatatcttagttgaacataaaaaaaggaagtttcatggagtgggtttggctactgatattattgaagcatcagctcaagcaatgatcaatgtactaaataacatatggaaagcaaaacaagttaacaaaaaattaaaaattttaaaagattttaaaaaaaaataatacatctagatatagaaatataatattttttgttgatttttattaaagagaaaaatttttatgaaaaaaaattatcgtatcgctgtattatctggtgatggaataggtcctgaagtcatgcaagaagcatgtaaaattttaaatgttttaaaaaaatatttttttctatctttagaaatacaaaaatttaatattggtggtatagctattgaacgtgaaggtgttgctttgccaaaaactacattgctaggatgtgaaaattctgattcaattttattaggttctgtaggtggtaagaagtgggataaccttccagtagaacaacgtcctgaaagagccgctttattgcctttaagaaaacactttaatcttttttctaatttaagaccagcaaaattatatccagaactaaaatgtttatcacctcttcgttcagatattgtaaaaaatggttttgatatattatgtgtaagagaattaacaggtggaatttattttggtgaacctaaaggttttgtaaataaaaacaatactaaatatgcttttgatacagaaatttatcatgagtatgaaattatccgtattgctcatttagcttttaaattggcacgatctaggaagaagaaagtttgttctatagataaatcaaatgttcttcaaagttctattttatggagagaagtagttgaaagtgtttctaaaaaatacccagatgttcatttatctcatttatatattgataatgctgctatgcaaataattaaagatcctaatcagtttgatgtattattatgctcaaatctttttggagatattatttctgatgaatgtgctacaattacaggttcaattgggatgttaccatcagcaagttttaatgaaaaaaattttggattatatgagccggcaggcggatcagcacctgatattgaaggtaaaaatattgctaatccgattgctcaaatactttcactttctatgttagttagatatggcatgaatttaaatcagatagcagataaaattgataaagctgttaataatgtattaaaaaaaggttatagaacttcagatatatctcatgataataattttttaaaaacagatgaaatgggtgatcttattgttgattctttaattaatggtgaatgacatgaagaaaacattatacgataaaatatatgattcacatattgtttatgaagagaaaaataatacatctcttttatatatagatttacatttacttcatgaggttacatcacctcaagcctttgattcattacgagataaaaatcgaaaggttagacagcctaaaaaaacttttgctacaatggatcataatgtttcgacaactagtcaagatattaatgcttcaggttctatggcaaaggtacaaatgcaagaattaattaaaaattgttccgagtttaatatatcattatatgatataaaaaatcctaatcaagggattgttcatgttattagtcctgagaaagggatgactttgccgggtatgactattgtatgtggtgactcacatacatcgacgcatggtgcatttggagcattatcttttggtattggtacttcagaagttgaacatgttcttgcaactcaaacattaaaacaacagcgttttaaaaatatgaaaatagaaattacaggagaaattcaaaaatttgtcactgctaaagatttgattttgtttattattggaaaattaggatcatctggaggtgcaggatatataattgaattttgtggtaatgtaattgaaaaaatgagcatggaagaaagaatgacaatttgtaatatggcaattgaaataggtgcaaagtcaggtttgatagcaccagatgaagtgacattttcttatctgaaaaataaaatgtatgcaccacgtggtgttttttggaaaaaagcattaaatttttggaagaatttgaaatctgataaaaatgctttttttgataaagttgtgaatataaatatttctgatctctcgccacaaattacctgggggacaaatcctgatcaggtgatctcaatcgatcaaaaaatacctgattttagtagttttgataatttaataaagaaagatttagcgaaatctgcatgtaaatatatgggtttaaaaataggtacttatttaactaatattactgttgataaagtttttattggatcttgtactaatggaagaatagaagatttaagagctgcctcaaagatacttaaagataaaaaaattgctaataatgttaaagctattgttgttcctggatcaggttcagttaagagagaagctgaaaatgaaggtttagataaaatatttattagtgcaggattcgaatggcgtttacctggttgttctatgtgtttaggtatgaataaagatagattaaatgatggtgaacgttgtgcgtctactagcaatcgaaattttgagggtcgccaggggagaggggggcgaacacatttagtaagtcctattatggcggctgcagctgctgtatacggtaaatttgttgatgttagaaaattatataatggtgagaataattaaatatgtttaaatttactggacatgctggtatcgttgttcctttagatatatctaatatagatacagatattattattccgaagcaatttttgaaaagagtaaacaaaattggatttggtaaatatttatttcatgactggcgttttattgatgcaaatcaattagtaaaaaatgaggattttatactcaataaaaaaatttataaaaacgcaagtattttattaactagagagaattttggttgtggctcatcgagagaacatgctgtttggtctctagtagactatggattcaaagtaataattgcacctagttttgctgatattttttataataatagttttaacaataagcttcttttaatcactttaagttcgagtgaaattacttttttatttgatattgtaaaaaataatataggtattacttttgatgtaagtttagtcgaaaaaacggttactgtaaataaggaagtattttcatttgaattagatgattttcattacttttgtttgttaaatgatttagataatattgatttgactatgaagcatttatcagaaataaaatcttatgaaagtcgtatatctgattttttattagaaagaagagatttcaaatcttaa

SEQ ID NO: 3 - DNA, 7258 bp, Buchnera sp.
atttttttgattgaaaagagacgtaaattaatacaaaaaaaggctaattatcactctgatcctacaacagtttttaatcatctttgtggatcaagacccgcaacattattactggaaacagcagaagttaataaaaaaaataatttagaaagtataatgattgtcgatagcgcgatacgcgtctctgctgtcaagaattcagttaagattactgcgctctctgaaaacggagcagagatattatctattttaaaagaaaaccctcataaaaaaataaaattttttgaaaaaaacaaaagtatcaacttgatctttccctctttagacaacaatcttgatgaagataaaaaaattttttctttatcagtatttgattctttcagattcattatgaaatctgttaacaacacaaaaagaacaagtaaagcaatgttttttggcggattgttttcttatgatcttatttctaattttgaatcgttgccgaatgtaaagaaaaaacaaaaatgcccggatttttgtttttatttagcagaaacattacttgttgtagatcatcaaaaaaaaacatgtttgattcaaagcagtttatttggcagaaatgtagatgaaaaaaatagaattaaaaaaagaacagaagaaatagaaaagaaactggaagaaaaattgacatccattcctaaaaataagacaactgtaccagttcaattgacttccaatataagtgattttcaatattcatctacaataaaaaaattacaaaaattaattcaaaaaggtgaaattttccaagtcgtgccctctcgaaagttttttttgccttgtgacaattcattatcagcatatcaagaattaaaaaaaagcaatcccagtccctatatgttttttatgcaagatgaagatttcatactattcggtgcatctccagaaagttctttaaaatatgatgaaaaaaatagacaaattgagctctatcctattgctggaaccagacccagaggtagaaaaaaagacggaactttagatctcgatttagacagcagaatagaacttgaaatgagaactaatcataaagaacttgctgaacatttgatgctggttgacttagcaagaaatgatcttgcacgtatttgtgagccgggatctagatatgtttccgatctagttaaggtggataaatattcgcacgtgatgcatttggtttctaaagtagtggggcaattaaaatatggtttagatgcgcttcacgcatattcctcttgtatgaatatggggacattaactggtgcacccaaagttcgagcgatgcaattaattgctgaatatgaaggggaagggagaggaagttacggcggcgctataggttattttactgatttaggaaatttagatacttgcatcacaatacgttcagcttatgtggaatcaggtgtcgcaacaattcaagcaggagccggtgttgtttttaattcaatacctgaagacgaagtgaaagagagtttaaacaaggcgcaagctgtaataaatgctataaaaaaagcacattttacaatgggatcctcttaagaatggcaaatattttactgttagacaacatagactcattcacctataatttagttgaacaactgagaaatcaaaaaaacaatgttttagtttatcgtaatacagtgagtattgatattattttcaattcccttaaaaaattaacacatccgattttaatgctgtcgcccggacctagtttgccgaaacacgcaggatgcatgttagatttaataaaaaaagtcaagggggacattcctatagtaggaatttgtttaggtcatcaagcaatagtagaagcgtatggcggcattatcggatatgcaggtgaaatattccatggcaaagcatcattaatccgccatgatggtttagagatgtttgagggtgtaccgcaaccactacctgttgctcgataccattccttaatttgcaacaaaattccggagaaatttgtcattaattcctattttgaaaaaatgattatgtctgtaagaaacaattgtgatcgtgtttgcggctttcaatttcatcctgaatctattttaacaacacatggagaccaaatattagaaaaaattattcattgggcgtctttaaaatatatcacaaacaagaaacaataaaaaaaaagattctactcaaacgagtcgtttttttaaattccatatccctttttataacactgaatcctcctgcgtcatcgcattacacaattcaacatccagacgtgcctgaaaacaaaaacatacaacaatgattctcatgcaattggaatgacaaaatcaaatatacacaatgaaaattttttaataaaacccgtaccgaaattattgaaaagaagttttaaaacagtgttaatgttcccaaaaacaggaggaaaaatcacaaaaaatacattagaaaaaatagaaagtatgaaaaagagaaaattattcaaggaaaggtgggtgtaatttttacttcatacaaaccacaacaagaattgattaaaactggtcatcgaggtgaatacagatatcaaattaaatgaaagaattggtcgaaatctgtgactgtcaatactggaatgtatctcagaaaataagtcaaactttatcacgatgggtattttttcattaatagagattatcaaaccgacataaaaaaagggggagcgattttaagtactatgtcacttttgtatgcatgagtctaaatgactcgactttaaatcggtcttgtcagcctcataagcacgctgtatgtgtgtaaatttgtgctccattagaaagaaaatacatttggtaaaggggaggagaagactagcggtgactgtcggatccaagagcatcatcaatcttcttatagatcgctcttctatcagttttctaaaaagcagttctcaaaatttaagtgaactccctgtctgaaaaatatatgagtcccggaaaacgcacttcaatcaccaataaaagataattcatgattctgagacagatgaaaacaaaagttggacaaacaatgatagagataaaatatctccatataaaaattttataaaatgaactgttgtcagtcatacaaaacaattcaataaaaaggaaaaaatgaaaatttttttctaaaaagttatccacagtttctgtctacaagtgaattttaaaaaatatgaaattttaagataaattccaaaacaaaatactctaacattatgttttttataaaaaaattttttttttaattcatacaatacatgttgataacatgttcataagtctggggataagttttgtatatatatacaagacactttccgatacataggaatcttacgcggaaaaaagaaaaacattaaaaacaataaattaattaagattagcattctttaaaaatccttttaaaagaaaaaaacaaatacatgtattatatataaggtttttaattgttattgttgttttgtattatactattaattagtatcactttatttaacatatttattaaatacttaaatatatattatacattttttgtaaaatcaaaaatgatattattgctttaatttaaaaagttagttattataaaacgaaaattagatgaaatttttttgattgaaaagagacgtaaattaatacaaaaaaaggctaattatcactctgatcctacaacagtttttaatcatctttgtggatcaagacccgcaacattattactggaaacagcagaagttaataaaaaaaataatttagaaagtataatgattgtcgatagcgcgatacgcgtctctgctgtcaagaattcagttaagattactgcgctctctgaaaacggagcagagatattatctattttaaaagaaaaccctcataaaaaaataaaattttttgaaaaaaacaaaagtatcaacttgatctttccctctttagacaacaatcttgatgaagataaaaaaattttttctttatcagtatttgattctttcagattcattatgaaatctgttaacaacacaaaaagaacaagtaaagcaatgttttttggcggattgttttcttatgatcttatttctaattttgaatcgttgccgaatgtaaagaaaaaacaaaaatgcccggatttttgtttttatttagcagaaacattacttgttgtagatcatcaaaaaaaaacatgtttgattcaaagcagtttatttggcagaaatgtagatgaaaaaaatagaattaaaaaaagaacagaagaaatagaaaagaaactggaagaaaaattgacatccattcctaaaaataagacaactgtaccagttcaattgacttccaatataagtgattttcaatattcatctacaataaaaaaattacaaaaattaattcaaaaaggtgaaattttccaagtcgtgccctctcgaaagttttttttgccttgtgacaattcattatcagcatatcaagaattaaaaaaaagcaatcccagtccctatgtgttttttatgcaagatgaagatttcatactattcggtgcatctccagaaagttctttaaaatatgatgaaaaaaatagacaaattgagctctatcctattgctggaaccagacccagaggtagaaaaaaagacggaactttagatctcgatttagacagcagaatagaacttgaaatgagaactaatcataaagaacttgctgaacatttgatgctggttgacttagcaagaaatgatcttgcacgtatttgtgagccgggatctagatatgtttccgatctagttaaggtggataaatattcgcacgtgatgcatttggtttctaaagtagtggggcaattaaaatatggtttagatgcgcttcacgcatattcctcttgtatgaatatggggacattaactggtgcacccaaagttcgagcgatgcaattaattgctgaatatgaaggggaagggagaggaagttacggcggcgctataggttattttactgatttaggaaatttagatacttgcatcacaatacgttcagcttatgtggaatcaggtgtcgcaacaattcaagcaggagccggtgttgtttttaattcacaatacctgaagacgaagtgaaagagagtttaaacaaggcgcaagctgtaataaatgctataaaaaaagcacattttacaatgggatcctcttaagaatggcaaatattttactgttagacaacatagactcattcacctataatttagttgaacaactgagaaatcaaaaaaacaatgttttagtttatcgtaatacagtgagtattgatattattttcaattcccttaaaaaattaacacatccgattttaatgctgtcgcccggacctagtttgccgaaacacgcaggatgcatgttagatttaataaaaaaagtcaagggggacattcctatagtaggaatttgtttaggtcatcaagcaatagtagaagcgtatggcggcattatcggatatgcaggtgaaatattccatggcaaagcatcattaatccgccatgatggtttagagatgtttgagggtgtaccgcaaccactacctgttgctcgataccattccttaatttgcaacaaaattccggagaaatttgtcattaattcctattttgaaaaaatgattatgtctgtaagaaacaattgtgatcgtgtttgcggctttcaatttcatcctgaatctattttaacaacacatggagaccaaatattagaaaaaattattcattgggcgtctttaaaatatatcacaaacaagaaacaataaaaaaaaaagattctactcaaacgagtcgtttttttaaattccatatccctttttataacactgaatcctcctgcgtcatcgcattacacaattcaacatccagacgtgcctgaaaacaaaaacatacaacaatgattctcatgcaattggaatgacaaaatcaaatatacacaatgaaaattttttaataaaaccgtacccgaaattattgaaaagaagttttaaaacagtgttaatgttcccaaaaacaggaggaaaaatcacaaaaaatacattagaaaaaatagaaagtatgaaaaagagaaaattattcaaggaaaggtgggtgtaatttttacttcatacaaaccacaacaagaattgattaaaactggtcatcgaggtgaatacagatatcaaattaaatgaaagaattggtcgaaatctgtgactgtcaatacaggaatgtatctcagaaaataagtcaaactttatcacgatgggtattttttcattaatagagattatcaaaccgacataaaaaaaggggggcgattttaagtactatgtcacttttgtatgcatgagtctaaatgactcgactttaaatcggtcttgtcagcctcataagcacgctgtatgtgtgtaaatttgtgctccattagaaagaaaatacatttggtaaaggggaggagaagactagcggtgactgtcggatccaagagcatcatcaatcttcttatagatcgctcttctatcagttttctaaaaagcagttctcaaaatttaagtgaactccctgtctgaaaaatatatgagtcccggaaaacgcacttcaatcaccaataaaagataattcatgattctgagacagatgaaaacaaaagttggacaaacaatgatagagataaaatatctccatataaaaattttataaaatgaactgttgtcagtcatacaaaacaattcaataaaaaggaaaaaaatgaaaatttttttctaaaaagttatccacagtttctgtctacaagtgaattttaaaaaatatgaaattttaagataaattccaaaacaaaatactctaacattatgttttttataaaaaaatttttttttaattcatacaatacatgttgataacatgttcataagtctggggataagttttgtatatatatacaagacactttccgatacataggaatcttacgcggaaaaaagaaaaacattaaaaacaataaattaattaagattagcattctttaaaaatccttttaaaagaaaaaaacaaatacatgtattatatataaggtttttaattgttattgttgttttgtattatactattaattagtatcactttatttaacatatttattaaatacttaaatatatattatacattttttgtaaaatcaaaaatgatattattgctttaatttaaaaagttagttattataaaacgaaaattagatgaa

SEQ ID NO: 4 - DNA, 22 bp, Artificial Sequence
  Description of Artificial Sequence: Synthetic DNA primer
tccggctcgtatgttgtgtgga

SEQ ID NO: 5 - DNA, 23 bp, Artificial Sequence
  Description of Artificial Sequence: Synthetic DNA primer
gtgctgcaaggcgattaagttgg

SEQ ID NO: 6 - DNA, 34 bp, Artificial Sequence
  Description of Artificial Sequence: Synthetic DNA primer
atcgaattctaaataggagaaactttaatgggta

SEQ ID NO: 7 - DNA, 22 bp, Artificial Sequence
  Description of Artificial Sequence: Synthetic DNA primer
ctagtcgacgttcaatgattcg
